United States Patent Application Publication US 2022/0211063 A1 - sequence listing, part 47

SEQ ID NO: 151 - DNA, 8605834 bp, Penicillium roqueforti (residues 6,884,669-8,605,834 of 8,605,834)
  misc_feature (89143)..(89590): n is a, c, g, or t
  misc_feature (91422)..(91652): n is a, c, g, or t
  misc_feature (329880)..(330016): n is a, c, g, or t
  misc_feature (430767)..(431098): n is a, c, g, or t
  misc_feature (461650)..(461666): n is a, c, g, or t
  misc_feature (496409)..(496588): n is a, c, g, or t
  misc_feature (532012)..(532106): n is a, c, g, or t
  misc_feature (539762)..(539897): n is a, c, g, or t
  misc_feature (569546)..(569750): n is a, c, g, or t
  misc_feature (649063)..(649199): n is a, c, g, or t
  misc_feature (691124)..(691186): n is a, c, g, or t
  misc_feature (866509)..(866673): n is a, c, g, or t
  misc_feature (1032465)..(1091864): n is a, c, g, or t
  misc_feature (1092551)..(1092762): n is a, c, g, or t
  misc_feature (1210222)..(1210434): n is a, c, g, or t
  misc_feature (1240580)..(1246852): n is a, c, g, or t
  misc_feature (1247779)..(1253711): n is a, c, g, or t
  misc_feature (1258330)..(1372329): n is a, c, g, or t
  misc_feature (1374163)..(1374571): n is a, c, g, or t
  misc_feature (1457570)..(1457856): n is a, c, g, or t
  misc_feature (1505383)..(1505555): n is a, c, g, or t
  misc_feature (1513254)..(1513416): n is a, c, g, or t
  misc_feature (1624076)..(1624277): n is a, c, g, or t
  misc_feature (1669186)..(1669391): n is a, c, g, or t
  misc_feature (1761254)..(1761480): n is a, c, g, or t
  misc_feature (1817801)..(1926100): n is a, c, g, or t
  misc_feature (1933201)..(1933451): n is a, c, g, or t
  misc_feature (1964013)..(1964390): n is a, c, g, or t
  misc_feature (2150548)..(2150646): n is a, c, g, or t
  misc_feature (2196778)..(2196986): n is a, c, g, or t
  misc_feature (2250772)..(2250828): n is a, c, g, or t
  misc_feature (2391584)..(2391875): n is a, c, g, or t
  misc_feature (2493614)..(2493845): n is a, c, g, or t
  misc_feature (2532220)..(2532497): n is a, c, g, or t
  misc_feature (2536366)..(2536607): n is a, c, g, or t
  misc_feature (2786762)..(2787018): n is a, c, g, or t
  misc_feature (2859720)..(2860011): n is a, c, g, or t
  misc_feature (2874131)..(2875235): n is a, c, g, or t
  misc_feature (2881752)..(2882057): n is a, c, g, or t
  misc_feature (2897306)..(2897484): n is a, c, g, or t
  misc_feature (3050874)..(3051598): n is a, c, g, or t
  misc_feature (3057389)..(3057640): n is a, c, g, or t
  misc_feature (3069739)..(3070114): n is a, c, g, or t
  misc_feature (3075970)..(3076344): n is a, c, g, or t
  misc_feature (3305361)..(3305458): n is a, c, g, or t
  misc_feature (3318647)..(3318971): n is a, c, g, or t
  misc_feature (3502937)..(3503051): n is a, c, g, or t
  misc_feature (3538222)..(3538805): n is a, c, g, or t
  misc_feature (3783649)..(3783863): n is a, c, g, or t
  misc_feature (3992502)..(3992620): n is a, c, g, or t
  misc_feature (4005402)..(4005665): n is a, c, g, or t
  misc_feature (4027592)..(4027792): n is a, c, g, or t
  misc_feature (4058717)..(4058863): n is a, c, g, or t
  misc_feature (4267467)..(4267504): n is a, c, g, or t
  misc_feature (4352970)..(4353432): n is a, c, g, or t
  misc_feature (4361969)..(4362121): n is a, c, g, or t
  misc_feature (4393887)..(4394120): n is a, c, g, or t
  misc_feature (4451619)..(4451756): n is a, c, g, or t
  misc_feature (4461648)..(4461894): n is a, c, g, or t
  misc_feature (4481354)..(4481472): n is a, c, g, or t
  misc_feature (4534019)..(4534156): n is a, c, g, or t
  misc_feature (4590279)..(4590507): n is a, c, g, or t
  misc_feature (4669101)..(4669433): n is a, c, g, or t
  misc_feature (4737275)..(4737369): n is a, c, g, or t
  misc_feature (4766897)..(4767094): n is a, c, g, or t
  misc_feature (4834677)..(4834984): n is a, c, g, or t
  misc_feature (4927667)..(4928240): n is a, c, g, or t
  misc_feature (4945248)..(4945398): n is a, c, g, or t
  misc_feature (5082668)..(5082816): n is a, c, g, or t
  misc_feature (5112709)..(5113430): n is a, c, g, or t
  misc_feature (5314787)..(5314980): n is a, c, g, or t
  misc_feature (5372720)..(5373147): n is a, c, g, or t
  misc_feature (5459101)..(5459212): n is a, c, g, or t
  misc_feature (5480412)..(5480585): n is a, c, g, or t
  misc_feature (5535554)..(5535568): n is a, c, g, or t
  misc_feature (5567702)..(5567841): n is a, c, g, or t
  misc_feature (5598930)..(5599143): n is a, c, g, or t
  misc_feature (5726966)..(5727044): n is a, c, g, or t
  misc_feature (5743477)..(5743945): n is a, c, g, or t
  misc_feature (5807639)..(5807725): n is a, c, g, or t
  misc_feature (5919971)..(5920649): n is a, c, g, or t
  misc_feature (5921963)..(5922269): n is a, c, g, or t
  misc_feature (5942845)..(5943124): n is a, c, g, or t
  misc_feature (6011310)..(6011605): n is a, c, g, or t
  misc_feature (6325131)..(6325449): n is a, c, g, or t
  misc_feature (6397541)..(6397652): n is a, c, g, or t
  misc_feature (6604798)..(6604968): n is a, c, g, or t
  misc_feature (6843737)..(6849488): n is a, c, g, or t
  misc_feature (6859843)..(6860483): n is a, c, g, or t
  misc_feature (6915200)..(6915987): n is a, c, g, or t
  misc_feature (6919291)..(6924161): n is a, c, g, or t
  misc_feature (6950610)..(6950746): n is a, c, g, or t
  misc_feature (7010146)..(7010383): n is a, c, g, or t
  misc_feature (7088736)..(7088959): n is a, c, g, or t
  misc_feature (7281029)..(7281208): n is a, c, g, or t
  misc_feature (7435388)..(7435513): n is a, c, g, or t
  misc_feature (7580067)..(7580387): n is a, c, g, or t
  misc_feature (7598064)..(7598213): n is a, c, g, or t
  misc_feature (7639278)..(7639394): n is a, c, g, or t
  misc_feature (7648488)..(7648695): n is a, c, g, or t
  misc_feature (8007457)..(8007643): n is a, c, g, or t
  misc_feature (8053200)..(8053665): n is a, c, g, or t
  misc_feature (8129339)..(8129754): n is a, c, g, or t
  misc_feature (8134049)..(8134237): n is a, c, g, or t
  misc_feature (8188324)..(8188473): n is a, c, g, or t
  misc_feature (8240007)..(8240478): n is a, c, g, or t
  misc_feature (8245915)..(8246026): n is a, c, g, or t
  misc_feature (8305192)..(8305782): n is a, c, g, or t
  misc_feature (8314148)..(8318265): n is a, c, g, or t
  misc_feature (8345463)..(8345564): n is a, c, g, or t
  misc_feature (8407840)..(8408046): n is a, c, g, or t
  misc_feature (8424732)..(8424857): n is a, c, g, or t
  misc_feature (8481626)..(8481849): n is a, c, g, or t
  misc_feature (8597147)..(8597393): n is a, c, g, or t
agtggtgtcggtcttggagtactacttgtacccggtgaacagctcgctatggcaatgtgagtgattccgaaacaaaactagcttttcttccaatactgactccgcctgatattgcagcagaaacgagaaatttgccatgagccaaataaacgcgttgataacgtatatcaaagctgctcgcccaggatgcctttttttcttcaaatcattggagaatatcgcaaaggcaataatgtttgggcaactgcctggtgacctgatccaggctttgaatgaaaaggaaggtgaccttctcggccggactacactgatgcgagtaaacgagcaggatgagatgagcttgtctattcaaaaggactcagattcttgggaagatgtggagatggagtcactcgcgttgcagaaagctgctttgttttttgaaccttgaaattgttgaaatatgtactgtataggtaatatttctattcatcgcagagcgcttttaggaatacgttgagcttgcgtttcatgaaaatattttaaattcagactttgtatcagactgggtatttttttttctgaaacaaagtagggtttttacttgaagcagtgtggctcatctcatacagacacacacatacacacacacacacacaattcattacgcccggaggtatcaagcctagagggcacctatacgctatttgatctttccattgtatacattttgtcatagcctcattttcgagaggaaaagctgaaccagctgcaaaaaacccctccagcccatacggtatgtcttaacgatttctcttcttgttgttgttgtcatatcatctcctccaaaagcaataacccatccctctgtgacaccggaccccctacgtgtccattctcgatgtagttttcgtgaacctcttccctgagtagcggtttaccgagagtacttctcatattaacgcccgaagtagctgactgcctcgctggcagcaacaccagatagcagacgaaggactgacgaatcgacatgcgatcgaaccggtagggcaggtgagttattgtgagcaaaacccggtgagggtaggttgaaaatgtgtaggcaggtcggttgttcgaaggctcgtcggcattgcgacgttgttgacgtgtccttttgaaggcttcccgccgcgtcgtcacaaccaataaaggagtttccaccggagtttcgatttgaaaagttctcagtttcggtcagacattgcagtccaacttactgacatccctccccacggagaaggtgactttccatgagggactcatctcatacagtaaaattcgaaatcagctttaccaccgaactttttcactctctttcccagcgccccacccagattgcgctaaactgtatttggccacggaaggtcccccagactaatggcatatgtaccttttgccgatcgtgaaaaataccgtaagcccgattactggtaccagacaccctgcgttcccaatatttctctcccgggcctgagtggcttttcgattgctctaggcttctaatatcaaacttttgaggcttattttccagtgcaatgattcactacttcgcgatgctaattctgtgatgtatcccaagcagatagctcccttacatattcactgtggttgagccatttgtgagccctggaccctggtcaagcttttactcaggttagacatcttttcattttatcacctaacacacaagaggtcttgatgatggcctagcattgtcattattagactaatggtgtgtgttggacaagtctatgacaaaaattgccacccaactcaaaatgtaaagacccgactcttgtgtgtatttctcggcaataaataccatgacattgctgctgatcggcagcttgctgagcggagcagatctatcataaattcttatttccgtagtaaagttcttccgcccggctggcaacaattcagctgtctctttcaaacccctaggaggtctgcctttgcatccatcatgagagttcaggcgaagtcctctttgtccttcatctttgcgactagagctcactttacttgaaactacgtttctggaaaatatgtcatcaaaacttccatcaacgtgtatgtgctgtgtaaactgatcaccacccccttgaacctccagcgcagcgaattaataaagccagcaaacgtggcaagccaggctccacaggattacgctcctgctcagcattttgccctcatctatatggatcaatatgggacacttcactatgaggcgtccccttcaatcgtccattatcgcgacactatcctttcccctcaagtcaccgcggaattcctgaaagcggtggcgaactccactgaagttggcctgcgaaggtcctccctggaattcgcttccacccagctatttcctgatcacctcgggaactatgactctcacgattctcggtttccgaaaggaatacaggccgagggacacgatgtgcctacaacatatggatatcattcacagcctcacctatggccaggccatgatatagctacccccgccatcttgaaagataaagtgcttcacaagaagagatcttgtttgcagaagcacggcctggagctccaagaagcaatgttatccatcaaagatacgaaatttctccgccgatactacgaaaaggtcttccacaatatacagcaaaccaattgccgagtcctggcaaaagcctatgtgaaatgtgttgagccccacaagcaagtcaattacccttataatgggcggaagaccgtggcgggggaaatacgacaattaagttccgagcagagtaagccaccatggtggcctcctcaagtgcgccatcgggaacccgatcatctactcaaagcaggtaacaagacactttactgcgcatgatacccactaagctcatcatctcactagaacgcatcgcgcttcttctccatattctttgtgatttgcgctgcagtcacggcgtcacatcacaaaaactgaaagatgcagagcaatctgttcggtcgcatattatcccggttgaacgtttagaactcctagatgagttgtatcgtgttagaggagaagaggaaaagcttttgatggggcttcttggtaagggcttgcaaccacccattcttcacaagctaatgaagtacatctagaaaaagacgcagctgttcttatctcgcggatcaatttacccgcttccaataaaatacccagcaagcaaacccagccggacagttgggtctctctgaagtacaaagagggtgcagcaacatacgaatcgtcctctcacaaacaagatttgtacaatgtgcctatatacccgcagcgtaacttcacaggatacaccactcgccaagaagacatgatggattcttttccggtcccggcaatgtcatccactccacttggaaaaaagcgcccgatgatcgacgagacatatccttctacggcaattttcagtcccacacatttggtatcctcgcagtgtgtcaccagccattctttgtttgtgaatcttccagtaatggaggatgtggggcctaggctacaaaatggtcccggattggttcatgctgaaatggcactatttgcagatcgcactcaaatttgcacaatttagagatatttaccatcacttactctcactgactctagcctgtcttgtttactctagtcgccaaaaaagataaacaagacattttccccctggaatagggtctggttggcacgccatatagcaaaggtataagcttttcacctacatgcatccattaacatatttttttcaccaatgccaatcaggtttaggctgagagagttcttgaaagcgtggtctctaagtgaaagcctgtcacaactcagcttttccatgtgtatcttccaggtcacggggcataagagtcaacgagatagacacttttgaaaaaaacactctatgagattgtagagagatcctcagtcaagaaatatgctaccgcatactgtgatagatcgtctatgcattgtgattgagctaacttgcggcgtaaaaactatccagtgctgcacgagcagaagtcacacttgctttgagactagtgagcgcgcaatatgtatgaaggaaagcagcttcttctttacaatgccccgctctatctccgtcgtccatctttgtgctcgctattcgaatgttttcacagctctcattgatcctgtacatccctaacatctttgatttgcgtcgaagatcgtcacagaatgatcgcaacagaagtgtgtcatcatttaagctgatagatgttagcatgctgcaaatttaacgtaagtttgaaggcttacaaggctttctccatttcctgagtcgcagttattgccactgcaatatgtgcatatagtgttgtagagctggttaaacgattttcctcatgatccatctctagcagttgcgagaaaattgccgcgtcaaaattccgcttaaggttgctttcgaattgctcatttgtcatattttaaaatgtaatcaaagaagacctgcatgctgtagtagtcgcgctaactgaaaaataaacgcctggtgggaattcttatatgcagtgagaaatgagtttgtatttgccgctgaagaggcccagagcaatcgaaaagccaccccaggcggcccggatgattgggaacacggggtgtctggtaccagtaatcgggcttacggtatttttcacgatcggcaaaaggtacatatgctgtcggaacgtggtcgttacagtacggactagtacgggcatagccaattgagtacttgagagtgtgttttctatatactatagaaagtgcagaataaataggggatgagcttagtaaggtcgttgagagccttacgatcgtcaggcagagggggtgctgaatattcctcgggcgcactagtaaaatggcgaccctcttttgttgacatatgccattagtcagggaggccttccgtggccaaatacagtttagcgcaatctgggtggggcgctgggaaagagagtgaaagagtttggtggtcaaactgattgaatttttctgtcgatgattctcagtgagccttacccaagttcgagacctattctctcccatcaatcaagccgccagggccaaaatttcaatgcaaaattaagagtagattattctgtggtcctgcaagacacgttacatataaatgccaattacctgtcaatcaaaactgttaatttgatttatgcaagaatgagagattgatgcatttaaccatcatcaaatgaggacctatattaataccattccaaaccttactctttgtaagaataaaaagtacatgcagagacgatggcaagtcgcgctagcccaactaagctgccggtggaacaagttgctgcaacaagcggatgctaaagactgtcaatgtttgatttaatcagaaaatattgcttcagcttacctgtgtcagttccattacagacctagctgacgttgtcgatgatagaaaatcaacggcattcgaatcgatgggccaccgagctggatcgtctatccccacattctctttgacatatttctgcatcagctccattgtcagagatcccaagcctttcaaggacaaagactgagattgttccggcgtgtagggcacagtgagttctaaactagctatcacgacaatcagtctttcaccggcgattttgaagtgctaagtacaataccaattttcaccactccgtctaaactcattagagtagtggagcactttaaagacgaatgttcatagccgcattcaatcagataagacaatccgtccatgacctttttcatatgagcaaagtcgtctttggaaaacggcggtaacaagaacttacttgtttgacaatggaagccagctggacctcactgggataggcatcgctggcgaccaggtgctctaaactgatcggtaggtcatcaacaatgaagtggttcactccattgtccttgaaacattcactggcagaaattatgttgaagtggtcgaagcgcgtatatttgtggagtgactcctctccatcggttcttgacgagcttcgtatggctactactttagaaccccggcgacgatgttcgcaaatcgatactgtaccggcaagatcgcatgtaaatatgggcttataagtctcccacggggaacaagttcgtataagtggagtctgcgccaaccctccagtatcgacaatggtggggagctccagtgtttttggcgaacctctcagaatcttgcgagagcgatcttgctgagccgcagggcccttttggtatttgatagagctttgggtatggcctggctgatcagtgaaattgtgaggctgcgtttctgctgccgtgaccgacgaagagaaatgcgcctgagcttgcaacatgtcaaaccgagtagcccgtttgtcttggtctcttttcatgtttgaatatagactctagaagactttcagaggaaaagaaaccaggtaccatggggacagcggtagcagtgtttttgtagggcacattcgagctgccatccacagcgagactatccgcagcgagccttgccatctgccaatggccattcaacgacctaagagcttaaatgcgctctgatggccgcttctcaaaccacattttgaggaaatcttatttggggattccgagatggaacaatctatgttcacagatgcggaagcacaactgacaactgagcggcgcctgaagtaccaaggaactgccaagatagatctgagccagattacatgtcacccatgcgtggctcgacaactggaccaaaagaatgttgagagactatgcgaggtatttcggaaggatggctgtaatcgacttgatgtgcaacatcatgttacagctgttgtaacccgccgacacttgaagcacgcccggcgggaggcacagataaccgcggaggaattgctgactaatcgacctgataaatacccgttcctttctttcccctccagccaaatccagtgtctacatggtcaacaccgcctgcatgctgcaacagaagtccttgctcctagtgagcgatggtggacggtggacctctatctagatggtgagtttcgttttattggctcaacttctattttacagccttcatttttaattgcctcgttcggtctgacatttatgtagacattagccatgaattacgaaataccctagtcgatgaatatgcaaacgagaagacacccactgatggagacatataccgcaaaatccgacaataccaaagcgagcataatgcagcgttccagaagcggtggtggacgcgtctttcggaaaataaagctaagcgtttgcgacaactgatgtctcctgacaacgtcgacatttgtgccgcctttgatgccctacttcccattccaggtctgtggaatggcctgagtatcggctctctcaatcgtgtactagcattgaagtgcgatgaagttagttatcatcgctttccccggcttccactcatttttcgctaatgacgaaggaaattatccactatttacaacatgtggaaagattctggtcgactctaatggatggcgatcgacatcagatggccaaaatcgacattcataccgtggaaaagcttcaactgagagccccagcggcatgttctgcggatgcgagagaagtcaaaggctatatactcggcggtgaggtcttctcccagtttgaggagactgaacaacctagaatatgggatcgaatgtccagttatgacgggatcattccttcaattcacacctttttccgcgatactacttatctcgaggcgtgcgcaaccggcgtgcggcagtttgctgttctgagcaagagccagccaacagtgcgagccgccttgaagcatgcctataagcctgacacgaccaggggggcatgtctcgtgcagacatcagatgcgagctttcggaatcacacaggcccaagcacggattcttttgaactcgcctatcgacaaatctggttatttgctatgcgccattacccggaaatggccaaagatgctaccagcaagaaagttgtcgccaagaccatccgcggaagagcggacgaagtagtgctccacaatatggctacactcgcacagaaattgggatttgactctttgccggtcactgaaatgttgaaccgttctcccgaccgaagaattgctcgcgaagctctactcaaggcccgaaaaccgggtagctaccgatatgaccccgccacattcgattcactcattgaccgattagtggagtgttttggtaccgcggtcgctcacgaggctttaccatcgccagatttcgttcttgaaaggacaccaacgctttcacgtcgttgtggtcccccactcgagcatgtgcagccgatagatcgacctcaccttttcctaggcaaagtgcattccaaagaagcgacagggccgcagactatctcctccttttttgtgagacaatgcgtgtattttgctttctttgacaagcctttgacatggacacaaagtcaagaccatgatcaagcttcgcctgagctgctgcaaacggacgtttctagatcccctctgttcgtaccagttgatgacttgccaagtaacccacgagtggtcccagctacgggatcagcttcacaaagacaatcacgccgagagcaacgccaagaacgacgccgtcgaagacaggcaactggaaaccggtcacaccgagaccggcgacaggaaattgttgaagaaatacatcctgccgttccggccgatccagtcgactccatcactgctgatgatgatatgggtatgaatgacgtcgcccatgttgttgctggtggtgcagacatttccatggcaggatcttccagtgagagtcccatcggcgggagtgatcatttagcgatacagaacgagttattccgcgacaccagaagagatgttgaggagaacccagagcttttgccaaatgtcgagcaagacgagcaagcgcttgctcaagtcagtgacacaaggcgcaacttgggagacattgtacacgaaccatcaactgacagtccaaatggccatgatactgcagagcgacaatcggaagtgaacgaggataccgcctcgcaatattctcaggactcttcacgaagcggcgagaacgactcaatggaatatgtggagtccgtcgtgcctgctgagatgcaagaccggttgacaagaggagtgtcttctgatgcagatctacaactcacgtcgtgccctgttgaggcggatagcgaaagcctgaatcaacggaccgaggaaagagaggttgcgcaagatgcagtacaacaagcccttcggatgcttgagcaggaagcagagacacgggcacatactagtatagaacggtcagaagagcaatttgccacgtcgaccgatgagccaactgcttcattagagcttcccagcccaggtgtgggaccggctgtgaacgcattggctgaatctcgcatatcgaatgaacattcgccagccacaactcagaatcctgacccgattgttcggcaaggtcgagtgccacgaaacgcccgagcagcaaagaccatcactcaaattgatttgactgggctggatgcagcaattattgtgggagaggatggacccgaccagcaagagcaggctgagtcaccaatcatcggtcgggctgcgatttcaacccctcttggtcaccaggaattgtcggagcatgagcagggcacagacaatatgggacctcgagagtttctgagcgatttgcctgatccttcggcctcaaatccgatcataggtgaatctactggcccgcctcgacccgcagcgcttcagatctcagcaggggccacgggagagggcgggcccagccaacgagaacaggcagatgtccaaataacccatcatgatatggcatcaccagtctctaagcctccggaacccaaagagcatgttcgacagacgaacaaaaagaagctacgcgaaaataaggatgactcgcaagaggctcccgcctcaggccaaaacataagtgagttcacagttccacctctgccggaagcgcttcgcccacgtcggaaccctccacccaacgcaatcacgattactttcaaaatttatgagaatggaggatggcatgtgacggaccaagtgccggtcagcccgaaggacccatcggaagcacatcgtatagcccacaagtatgcccgcaaggacaacaaacatgcgcgcttctacaacaagaacttacgactagtcagcgctgctcaatgtgtccgggccgcgatggatgatggatcgaataccgtcctcatgagcctacaacaggatctcgtagtgacacgagccaaagtggctgcggtggccgagatgatggaagcggacgctcagagaagggcagcaactgatgctgatgatataataatgtagtcaggtttcgaactagtcttgagtcaccaggcgtcttaagctctgagacttatggcttagcaggtcgtgaaattgtaggggatataagttggcattctaatggcctggtaggtcttgagaccgcggtcttgggacctgctgggtctctggctctgtgtctaccgccctcgggtcagtgtcaccgagccctagttcgtagtcttatatgagcagatttcagttttaggttacatgtcatcagctttcaaatatgtttcttataattgcccgggatttaagcctatagtcccatcgccttggtggccttctgttaatggacacgtgctgaacttgggcttcgatcctctcgggctataggagtacttctgcagaaccttcatagtcccaggacccctagccacgcagttaccattcttttacggacctagatgctcgtcctatatgtgaacttattttcttgcacttggtggaccccaatgagcattaaaatcatatacgaaccaaagacaaagatcataggaatcactgtcgtgtcgccataaccagagactccgtcacagttgagtgaaaatcaccagggatatgcctgtcaccaactgcatccctcacgtcgagcacatcatatccaagctcagcagccgctcgggtagtggtggagacacacatgcgccatatagccaaccaacacgactttctttcctacatcgcctagaccttgcagataggcatgcagatcggtctttgcagacgcactaggaaagtctttggtgatttacacaatgtaacactcctgtttcttcacattcgtgaagactttgccactctagcatgaaagaaaatagtaagggaatatgttcgattgttgcccttatggcctgtgatctgtggcttaaaagccgcatcttgtaagatagtttctgctatatccaatcaaagccaactcgtgcgtcatgtagaagagcagatgcttgagatatccagtttttcgcatctccattatcccgtccgactgcggatgaatcagacttgtttaacacctcggactcaccgcccaatggagcattccacagctcatcactgtctggcatgcaaaaggacaagtcggccagggtcaaaagattggttgtgccactattggaacattctccgctcaagtcaaaggaagcgggagtggacaatcggcacaccttatagagggctagtccaaatctcttgatctcttcaacgctcacatatacaagcgcgagtggtgcatcggcatcgtgttgcagaagcatgttgggatagtagaaaataccccaccgtcgacagctttgaacaagcgcagccaagaggtcgtatttgtcgtctggtaatcggcatcgcatgctcaaatctgtactagcattctctcttgcaatgaaaagagaaaggatgatattcaagagcacactttgaaatgatgttatgggccacgtggtatttgtgtgttggcgtggactcgagttggagatgcaccattggtcctagagcacaagaatgagattaacacacaattctatatacagttaatattataatgcttcttcttctcaccatttgagcgttaaatgcggaacatagtctattatgtagacgtattgatgcgtctcgtgcctcctgagtccctttaacccaaagtccgattgcgacaacggattgaacaagtacacaaggttccttagcaaagtcaaatgtacttcgatggagaaacggccaccttgagtggaaagtatcaaagtaaatatcaatatagtcatgagcaatccaccggggagcgtcagaaacggaatcattaatcgtggaaacaggcggcaaagggcaaagatcatcgatcgaaaattgttgttcgcctacggtttcacccccactaggcacacagaagacgccgcgatgttgacaggcattgcatggtaatatgccatcacaacgtactttccgcacatgacatgcaatacatgccctaaatttccgagacggcggcggttctctctgcggatggtaagtccggatatggcgtcgcaataggtcactgattactctctgagttgaaagtcttcccacgggatcggagaaactactcacttcctggtcaggacgctctcacaataaggacagggaagattgatttccttatcatgatgattacgatgtcgattcaggtgctctttacgccgatatttggcgttgcaatctggaaagtcacattggaaccacaaggggacagtatcggcatgaggcggcattgtgcagaatttttgcaaacctctggattccacaacattgtgaaatggcaaaaatggaggcaaaaagggagaagagaaggtaatgactggagctccggtggggccccgaggaaagtcaccaatgaagttacaccggtcatcccgcttgatgagtaactccacaggtggcgctaactatatacatatccgtggataaaccggcaagtgggataggccgaccatccaagtgtatatctataaatggcaaaccttcgaaatggtgttactccttttactgcctccactatcttggaaagatctcttggcagttcagtggatctcaattggagtgcaccacaatgcccaacctctatcaccctgaaacattgcgcaacgactctgaacaaaccgacagcgtcgatgtctgcaccgaaacctacttcgcctcacatcttgagccagcaatttccaaactggccagcatacatgcacctccggaattcgaagtttactgggactctgacgaccccgaaaatccccacatgtggccgctttggtacaaaggcctcactgtcgctgctatgagtcttggtgctacagttgtcagtctctccagcacactgtatacatctggaattccaggactacaagatgattttcatgtttcgaagatcgtggctctccttggtgtcacgacttaccttcttggaatggggataggcagcatcatttttgctccactcagcgagcttgtgggacggcggccaatctatattgtctcaatgataatatttttgtttttattgttaccgagtgctttagctcaaagcattgcttcaatcctcgtgagcagattctttggaggattctttggaagtgcattgatgtcgaactcgcccgcatctgtgaatgatatcgtctcggataagcaccgtgctttagcattcggcttctggtctattggccccaccaacggccctgtttatggcccaatcataggaggatttgtgttccaatatcttggctggaggtggacaaattggattgtcctcatcattgggggtgtggtcctggtcctgatatcctctgtcaaagaaacttacgcccccgtgatcttgaaaaagcgcgccgcgattaaaagaaaggagacacaggacccaaaatggtggacacgctatgacgatggtgtcggctttacatcctcactgatgatcaatctcaagagacctttcgtgatgctcctaacagagccgatatggtaaactatctccctcccatgctacaaagccaatgttaacattctcgtagtatattttgggatggctacgttgcgattgtttatggcatcctttacctatgtttcgtcgcgtatccaatcgctttccaacaagaacgtgggtggtcgccaggcatcggtggtctttcattcgtcggtataggcgtgggtgtcttgatcgccattgcatgcgaacccttgtttcgtaaagtgatcaatcttcatcgcaaggatccagaaaccggcatggtacaaccagaggctatggtcagtgtcgtcttttttggtgctactcttttagccattggccagttgtggttttcctggacttgtactccaaacgttcactggatcatccccatcctagccggtgttccctttggaattggtaatgcatgcgtcttcatttacgcctcaaactacattgcccggtcttatggcatttacgccgcatctgcgcttgcaggaaatatgctcactcgcagtgtcatgggagcattcctcccacttgcggggccatcaatgtataagactctgggcttgaattgggcaagtacaatcctgggaatcgttgagacagtatgcatcttgattcctgtcgttttctacttttacggacacagaattcgaaaggccagtcgctttatcaaagaggtagaaaagctgcaggcagcttgaaaaaacttattagcaaaatgttatatgtgctttatatttgttcgaagtgaaaattgatgtctacgataagtcattttataacaacgttccaaaattcatctatctcctaaacggtggaccgtgacaatcctttaagatacggtgtcttgactaaggaccaagctacagttgggtataaagccaagagaggttacctttttcttttcgtggtttcaacgggatttccagaataaaatacatttagtcggagtaagccttcgagcgcagcagatagcagttgtgttgttgtgaaggtcatatactcagcaaacattccaacccaaaacgtaaattacacactttacggaatatttgtcgttgttccatctagtgattttgaattatccccaccatattaaaccgtaaacagtcagattctccgccaagccttttgtgtgcaaccttgaaagtggctacgaagtggcaattgcttactccgtaaagagtagagaagaattactcaaattgattcacaaccactgtgctgaataaacccgtggacatcccgcagagatattataaatttctctccattttcgtggcaaaatggaactttatctctacgggcgggatgagccgaacttacatcatcagtaggatgaaacagaatttctaatattttcagaaaagcaaagtatttaaacctcggtttcccatgaacagagggtctccatatttcattccattgaatcacatccacagtatcaaaagttcacatccccgactttcgctcttaccgcagccatggcagcaacatccaaaccaacccttacaatcacacacatcaccacagcaactgccattctcaacattgatggagtcaactttctgacagatcccttcttcggagccatcgaagggacagagtatgattcgaccgcggtctgggagcaaatggacctgaaaccgtacggtctcgacagcatccccccaccaccgcaccttgtcaacaagcaaggaccagcgcttcagctcaatgaactgccgcctatcgatgctgtccttcttagccatgaggatcaccttgacaatttggacccagaaggccgtaagctgctggatggtcgaaaggtgtttaccaccgtggacggtgcctccaacctgcgcccacgcccaggagtcattggccttcgcccctgggagactgtgacttcttgtatcggagggaaaacgtaccgaatcactggtaccccttgcaagcacttcccagttggagaagttacgggcttcgtcctagagaccgattccttcggtattgatccatctggcaagcctaatgcaatctacttctctggagataccgtctatattgatgaactgcaagagattggaaagagatggcacattactgcatgcattttcaacttgggcaatgccacctttgaattcccaagtggccctattcagattacaatggacggtaaacaagctgttcggcttgcccgtgatattggcgccgatgtcatggtcccaattcatttcgaatcgtgggatcactttaaggagggcggagcagagttgctggaggttttcacccaagagggatttttagacaaggtgtgctggacagttcctggcgttcccaaggttgttttttgattgtgaatcaatctatcaatattgcggccctatggccctctttctgcttttatgcttttcttttcttttcttttctttttaccgtaagttgatttagacaaatttctcagacccaaagctaagatattttccaaaaaggaacatatcacgaaacagaaaaatagtccctcggtagaaatagaaaatctctttctattctcaccatttgatcttcaatgccatacaaagcagggccttattcaatggctgaaatgccgcgccactcctcgtttaatttttatcctttgtttgaggttttgaaatgtaacatgacgaagtccaaatgacccagggccctatacattctctgcagtgaagaatgttgtcggggctgaatgaaacctcacgtttcacatgggagtttcgccaacagatatgtcaaagtcatatagatgcggtaaactatccattgcggacagaatctctctccatgttccagtctcgagcttcacgtgccttaactcgatgtacttcatcgattcactgcattgctctataatattgacgagattttgagatgaaattttcacttcgcgcagagacaaaaactgcaggcgaacagttgagccgagcttcagacgatcaatacttagatagttcgtgctgctgagcgagagtgaagtcaggcttgtcgaaagctccgcgatgctcaacaagtgggccgcacaggattgctggtttgtttgtgcatagacttgcaatctaagatggtgaaggcgactgagagtctgttcaatcggtatccgcaatgtgctgatattctcggcaaacaatggagcaagatcattcgtcatcggtaactgaagttcaagttctgtcaagttgggcagaggcacgtagcataacgacatgagcatcgagtcgatcgatgctttcatcttgtcatggggcaataatgtcaatgaaggaccacggaagtcgagagctttgagattgggaaattgacgcaagcataaagacagcaagccggcaaggtcttccgtgtatgatgtaacctcccttatcgagcatgggaaggaaccatatccaatatcgacttgacgcacatagtgggcataggggctgttagaaaggctcaccagctttcctaaggatggaaagtgcctggtgtggtacaatgaaccggctagggctataatgtggcggaaaagacgggctgaggcactatgacacaagcttttgttgaccaagcggagttttgcgagattcctccgattataattgttcattattcgaaattctcgaggagccgacgtctttgaagaagattgcgaagtgccgatctcgacataaaatgtaatctgccaaaagaattgttcagtagtggcgcagggtgtggactggtacaaatcatacaaggtcaattatctctgctggaaggtacatatcgatcaacgtttaagcatctttggcaggaaatcaccctgctaaaatattgactggcttcaagtgttgcgtgagcccctgcggtcttaccacccggtcccaaatttggaagagaacaggagcccacgtaagagaaagagattggcaatcgtcttcaattataccagcctattttatcttcggcgaaacacaaaaccaattttccgttgcaatgtaagaattttaacttgatcttggagtcaaaaacaaagcatcagacatgttctacccatggacatttaattgcattcccaaaatctagtcttggcgggaaaactagccattttgagacggttgaacgccacagtgggtccgtaacgtaaacattctgtactgtgtttgaccttcacaacactaccagtcgtcctctcaagcttgctctaatatgaggagaccctgtctgctgcatcgatgacgaaaaaatataaccatttctagcttttatacccgtgtcttagtctctagccaatacatttcctcttaagcgtgccctatgtacctaactaaatggtgtttgttctgttattgtaggttgaagaaagttcatgaaaacgcacggaaaacatagaaaaataccgggtatctcggagtatctctacttgattgctaattgatcatcgctgccctggggatatgtaaccatggatcctgctggtcggtatcccgcccgttctcggaccgaagagatgcacgtgcaccctggctgttctctttgcaactacttgggcggggatggtgatttcagatgtggctgataaatcattccccaatgtccttggatatataacttaacccaactcccgaataactgcattaatctggtaaaccttgagttatgacgaaatccgctaacttcggtacttccaatatgcggtgagtctcttcatgaaatcgataacattagttgtgctctaacgcccaattagaaatcaatccaatcatcccgccaatgctgaggaagaggcatattacgaccttggttcgtatcgtcgatcagtgaccacttcgtctgcggaaacccaattgtggttcaatcgcggattgaaatgggctcattctttcaaccatggcgaagcggtccgatgcttcgaacgagctgctgaaagcgattccaattgcgctatagcgctctggggaattgcgtatgcgactgggcccaactacaacaaggcgtggagatactttgacccagaggatcgtcaggcttctatcaagaaggtcaaggatatcctcacccgagcgtccaagctagcgagccaggccacaccagtcgaacaagcgttgatcggggcaatcggcgctcgtttcccaccaattgatgacatccccgaggaactgggccctttcgaccgcgcgtatgcggacgcgatgcgctctgtgtatcataagttcagagatgatgtggacgtggctgcgctatttgcggaatcgcttatgtgtatcactccgcgcgggctatgggacttgaacactggtaaaccaaccggggatcacaccattgaggctcgcgaagtgattgagctgcaactgcaaactaccggtcgcagccatccagcaatctgtcacttgcacatacacatgatggagatgtcgccatttccagaattggctcttccggctgcggatcgactacgtggcatggttccgcacgcttcgcatatgttacacatgccgacgcatattgatgccgccgtcggtgactatcgccggggtattgattccaaccatgaagcgatccttgccgacgacatctactttgcccgagagacgggtacaactatgtatgcggcgtaccgggtgcattacgtttgtgcaaaattgtattccgctatgatgtctggccgattcacggacgcgatgtccgctgcagaaaagcttgaacagatcaatgatccgaacctgctatccgtcaaaagtcccccaatggcagacttcatcgagagcttcgtgggaagtaaggcacacgtgctagtgcgctttggtcgctgggaagagattcttgacctcaagcttcctgccgatcgcgatacatattgcgtaactacagccaccatccattacactcgcgggcttgcattcagtgcacttggacggattgcagaagccgaagccgctcaaaaggagtttgaaatggcgcgtagggccgttcctagctcccgactcaacagcattccgtgcaaggaggaagatgttctcgcagttggatctgctatgcttgctggtgaattagaatatcggaagggaaatattgagacggcgttccattcccttcgggaagccattgtgcacgaggatgcactcgcgtacactgacccgcctgcctggatgcagccagtccgccatgcgctcggtggcctgctccttgagcaggggcgtatcgaagaagcagaaactctgttcaaggaagaccttggcttcgctcttgactatcctcggcgtaaggcaaaactcaataatgtttggggattgcatggcttatacgaatgcttcagtcgccttggaaagattcaagaggctgctttcattcaacctgcacgggatattgccttggcatctgctgacattccagtcaatgtttcatgcttctgtcgaacttcttcggtagcaaaggatggatgttgttcatgattgatcattgttgggtggcctgggggattaagcacgcacagtaaccgcacctgctgtttgctataaccatggagagctataaatagctttctttatttctccctcccgtccatcccgtttgataggaataagcatacagtttaagcatacattttctccgtacagatatccgtgtatgctgatttctagaactatcattttgctggggggtcacaatccggaaggcttcaagctgcacccgaaatatgttgatctcatccgtcgacacatcagtgctgggaagttgctttttacgacttacactggctcagccgtatttgcgtctacggggctattagatggaaagaatgcaacgatcaatcacgcggtgtataaatgggcgaaagagaattatcctgctgtcaactggactaagggggaaacatgggtcgtcgacgaaaatatctggactggagctggtgctgttgcgggtatcgatatggttgcaagttggctcaaggagcccttcggactggatattcttacatacgctgcccgcaatctggactacgagcctcgaggtatcgatggtgtctcgcttgtgattccgaggagatacgacgaaagcgggaagcaaatcagcacccatgaacttttctatcattagcctttggattttaaagatgtgaatttagggctccactggcggtacaccagttgagaaatccaaatgttgtcattcttattgggtattgtaccctaaagcccgtaggtatatatcaattccaagatccttgctagagcaatgcgctttccctacatactcaattcctcgctttcaataattggctacacaaggctactgttcgttccgtgaaaagatttcatatatgtcaggaattcgacgtgaactcaagatttagatataacctaccagctcaaattacctgatttagacaaagcaaacaaaataagtcatttattgttgattgaagggaactggacccgtcacagtcgagtggaaatcaattgcatggcgttggaagtgcattactttatcaaaatctcgatcgcatatattgcatgcgattttggtgttagctgcaaggttttgaagatgctttcgcttgatatgctttgaaacatcaccatgcgatgcaaattgctgcaaacgcttcttcatatctaaatctttttgtcctagacaaataaagcaaaaaagcggccgatgatcgttcgtgatagatcggaaagcagcctcaagaggagaatctgatttagacttgctttgggtcgcttcgtcatctgaggggtgattgccaagacaatcaagctcgaccacgttattctcaaaacgtttgttgcgcggcagacggcatgtttccccttcctcgaattgacagtaaaaagcgacagcatcgatggcttcagtccgccgacgcatctcctgatccaaagttggcggtggcagactcaacaggcattcgatcagacgcttttgaggtggaggaagctcctccgatctttgcaagttggttttgaccgctttttcaagcgtagcctcagacagctgtcgttgaacttccagcataggttgctcttggtcatatttctcctgaatctgtgataacaacgcatttctggcccgttctctcgcgccgttgatttcttgattcagctttttataagcgtcgtatttaacagtgcctcgatgccgcgagaggggtcggcctagtttttgacgaagctcgtcacgacgctggaccaatgatagaatttctggcctttggttgacagaggatgattgcacagttgtcaggtcttgcggccggtttgggtcgatggtcctgctcatccggcaggctgcgtgcatgatatcctcgtctggattaagaccgcgaattaaggcaggtaggtttttatcaatccttctatcaaggtagtactttagaaaggtgcgagtatcggcatggtgcataatcaaattacgaagagagtcgctcacggaacctaaattaaaagaagccatgattagcaagttgtgaatgcgcacgatatataaatatgcaaggtgagttaccgctattatccaacgctttggcagcgccatatcgcaagctgtaggggcgagcaacttgtcgaaatccagtgatgactccaattgttttgacccacggaagcagtgtagagtatggtagaggcttgtcgggggagatgctcattccttgcaatgaccgttctgtttgtcggaatactggaacatcgtctaaagccggatcgagcagtaatggaagttcattacaatcttctggaatatttagacgaggaagctgatctgcagagaacaaaacctcctgtccctcgacccgtttgaaagcacgatccccaaagagcaagcccagcaaagagacatgtggactgagaacaagcgatgggtcaaaaatgatctcaggaaggatataagtgttcctgcatgctggttaactatctgaagaccatagtaagtccttgatatatccactcactcgtctttcgtgccaaggaacccttttgtgaactcgaaggtgaactcaatcacgattctatgtgggccaccttgcggatctcgaagcaaactgattcgaatatgacggtacatcaaattcaatatggcttgaggacgattggcagtgaggccagcaagttgcaagaagaggcagagctcgatacgatgcctcccatgtccaaatttcttttttgtagtactgatcgcggtctcgacgaccattgtcaagtcctccacgtacatggtggacttttcacggcccttacgagataacttatgatttcgggataattttcggatgacctagaagagtggttaatgccaactatacggtgcggacttaaagtatatggtggacttttcacggcccttgcaggataacttatgatttcgggataaccttcggatgacctagaagattggttagtaccaattatacggtttaaagcgtctttggaaggacaacggtgccgtgattcggcaaaggggggattcttacccggcgcatctgtcgattcatgcgattttcaatcttgccagatgtggctctttcaaaaacaagtcgaaaaaccttccagaaagtttccagcgagctcttccgcttgattccgggtagtcgtcttccatttttccctcgtcgcagattcaaagcccaatccagaaaggtatacaagataccaacggataacttcaagaattcttgctgaggatcttttcgaatacatgcacagaacctgagacggctcttagttagtcatagtgtgtagaaatactaggagtgaaagactaggagtgctcggattcctaacgaagaagtgtaacgcactgattccatctcgtttcaacttggtcaaggagagacacagtgcctttgctgtaatcctcctgggtgtaaacggactcgtcaaactgctcaagttgctgcagatagtattctggcaaatgctcgttgtctgcaaagagctgcgcgacatcgccggcatccttcagctgatcgtcttcgcaatcaggctctgtgggttccgtttcatattggtcatcgccgctatcgtcggagctgtcggagctgagatgttcatcttcatacggaggagagttggcctttcgccgggaacgagccatgctgtggtaacgaggaatcgtccagtgaggagttgaggataaatgctcttggcaaaagagagccagggagggaaaaaagaagtgggaaaactcttttggaatgagtatcaaacatcgaaattccgacaagaccccaaggggaaggccccaatatatgaggccttccactgagcgcagcgtttccgtgccattgtgggaaaggctcctgagagaaaagagggacgcagcgttgacctgaatgaaaaacgcagcctgagtaccaagtgtggagaacaaaatgcaggtgcaacaccctcagggaacgctagaaaattgaggggtgtgctgcgccaagcggagattgcgtggccgtggtcagagatagaagtgcgtggcatgaaatttggcaaatcgacggcctaaaacggccgcacttgcggccatttttggaagcccgtttgccgtctgctaccttaataaagtatagataaagtagattttatacttaactataaccttattactaggtctttaaacttagtttttatagttaagaaagattctcttatactaatttctattaaccttacttatcgctatacctattatataggtaaggattaagtttagaaaatggaaatatatactaaaggtattaagttaaaaaaaggtactagagttacttatccctatataccttatattaaaggaaaaggatatatactcccttttaggaaagttagatctatctattcgaaccttagagaatttatctatctagatatctaaagttctatcttaattgctttatatagaggtaagagatattttattacctttatagataatactatacgttttacctaactattcttacttaagtctagattataggttactgaataatatatctagtttaagacctaccttaagacttagtttaggtatatagttaaaaaagtttatagggataatactatagagtataaacctcttataatttacctaaaatctaaaggaataatataggatcctacttccccttatataaagtagctaaatagtattatagagattaaaaattattaccttattaagcctttagtagctattataatagagtattagttcttaaagtacctctagggttatctcctagggggtattaactatataataaactatctttataccttaaaaattaggatatcgctatataaagcgctatatagtaaaaaacctaacttattaaatctttaggctctaggatactaatactagttcctaattcctaaagaaaaaagataaacgaagttagacccttatatagaggaagctagattaatcgcttataataaaggtaataactatatcctatataatatatagataaagaaaattaaatattctcgaaatattatctttaataaagtactaatactaaaggtatttcctaacctaaagtataatttaaatattaaaggtataaatttactatagtaggaggtttccccttttaatcgctatattctagttaattttttaaattaatacaattattatagagtacctatagagtaattcgacttctccttagttataaacgatatactataagtcctgagttatctacttttagtacctctatattttaatactcctctacttcccttagttaaggataatcttaataagagcctttttagcctagtaagtccttcccttaaacccttaaaccctataattcttaaagaataacttctagacctagaatccttttaacctagtaaataataataatattaatatagtaggtagctttagaaggtttatagaagaataataggataagctaagtacctatattaaagtagaactatagctacctatctaggaagaggttaaataaaatttctcctaggatttatcttaggatttatactatagttactcttattttaagttaaccctagataactgagcctttaacctaacttatatcttattattaagaacttaagaactagttaggaaaccttattattcctttaggtagtataaactaacttaagcttaccttaaaagcctttaaacttgttccttctttaatataaatgttttatatctacttattaagtctttagagattctacttaatctttactctatagtaatcttaaaagaaccttaatatataccttctaagctaaaacctactaatattagttttaagctaaaagattagaaggaagctatatcctatattaagaaagagaagtggcttactactacttataaagaactttcttagtaaataattaatagaatatagaggataatcccttaaggataaggaaggaagggttgtaaaccccttaccttatactaggtatttaaaatcaagtataataatacctataaagtgagacttattacttaaggcttttaataaattaaggatcttgatttctttaaagtttacgcggttattataaagctaatattatttaaaatctttatagctattatagctactataggttagctattatactatattaatattataatagtatttttatatattaagttaaaagaacctattaaaattgaactctctaaagggtaaagagaagaatttcctaattagattagtttcctaataaaaactatttatagcttaaaatagagtccttataaatagtattaactactatataatatactgattactataggatttagtaggatataatctaatcactctatcttttttaagaaggaatataggaagcttcctatctttattataatctatatcgataacctcctagtcttatatacctctaagagcgatatttaagaatttaagattataatctcgaagtactttaatatttctaataaaggatatcttaaacgatatcttataataaacgttttttataataaaggaaaaattctcttattataattcgactatatagagaagatccttatatactttagacttaaaagctataaactagtagctatacttatagataaaaaaatagccttaatcccctataagggtactataactaagttatagattaaggaattttagataaaggttagaactttaatatagcttatagtttcgataaggcctaatatctcttttatagttattaaacttatatagtatgcgaagaaccctagtaaagcctacttctaaatattaaagagggtatttaggtatcttaccggtataaagaatctagtcctctcctattctatagaaagagaagctttactctctagttattataatatagactaggtaggtctatatagtaaaaaaggtctattaacctctggttttatttttaaaataggaggtagccttattttatagatattaaagaaatagccttatatagtactatctattacagagagcgagtatattacagaagtactagcggtataggaagtaatctagttatcctaactgctttctaagatcggtatcgaaggcttcttagtaaagctaattcctatctatactaataataatagggcaattgcgcttaccttaaatcctgaattttatataaatataaagtatattataatccggttttatagacttcgagaggaagtcgcgaatggcttagtgaaatttgttaagattcctactaccgagatagtagtagatggacttacaaagccacttagaagagttatatttaagcgatggatttcacagatcggcctctcggtctataatataggttaagtttatatatatatataagtaggtatctggttttgtttttttatagagagatagtgtttaaactacgctggaaactcgactatttgttagtcgtggggggtgttcgaagttatgtgacctctctccgctcctaacaactatgttagtcctagcagataggtagtttccttttctctcttcacgcaattcatgagaactttccagagtgtctacatttcatccgtagactccttgattcatctctaacaattaattataacgatcatacgattacagagatctcctcaaaacaacactaatgcacgggcgtacatttctagcttagtgcgagcgacgatctcccaggatctggcgtactagttagagatcgagtattagttattgatgaaggtgcaggctacgagaagaagggtgatcaaccagaaagatgatgatatgaagtggatgaaagatgctgatctagctactgccaagaagctctctatatagctccatgctacaaagctaccagatcccatcctccagaaaccagaagaaacatctctgcaggcgtacaaagggaatgccaacacagcaagctgaacggcaagctgcatgcgagagaaacgaaagaaagagagaggaatgccacagagagggctatgaacagcatggggcaacagtgaatacttccaaatgcatcatcatttatgcggtgcgccggactgcgggagatcgtcgccgtagtcgcccgccctaagcctgctatgattcacatcgctgtaatccgtatttcaactctgctaaattcccctaggcagccagcgtatctgaccccaaatatcgagtcatggacacgcctgttgatcttttttaaattcccagtgggtctcctacttaaacagtgttagtgttgtcctaacgaaattgcgctaagcttatttataataacaatagcgcctctggaaaagtcgagtaactcatagatttatgatgatcgtataatcttcctataactaatgctcgatcctgcggtacttctgacactcgacccttggtatcgagttttcgtaagggctgtgtttccaccccaaaggcaaccttgtccatgaaagtattcctgccgggttattttctccataagggccacgttaagattaatagatttaggggattcagggattctagtttctaactattcaatgttgttatgtttggtgttccgaaattccgagggatccccgaccgggtattcctgacctgctaacccctgctagccctattcctgcttcgtttctgaacgcgatgcaacatcaactaatgtaggaggatacttacctgcgctggaagcttgatggcaacgaggactgttcaaatccctcaagcactgtagtcattgatcgctattcaacagggattctgggcagggcaacaacaagcaccatagaccaattatgggatatagcatagaaatatctagaactgtctacctttatgtgacaatcaatgaagcttcttaggagaatcggcggcgtatattcgggctaccgttttgagctagtaatgcagtggccagagggtgcttaggaatactacataggttagggtaagttatacattttctatagagttgatggatctacagaactacttcaactgaggccgaaggatcatggcttattgatatttttgggtatatcaggcgcattaacatgagcctcgggcttcacagaacatagtaacaccatatctacaacgtgtgctcatctttgaccaaatatagtatggaataattgcttgtaaagtatgctggatggcttagcctgctccgaaccctgccattgtagtcgcttattaaagaaacattatcaccagggtctgataccaatctagttaatgatatgcaaaggtggccacgacttccgtcctatgtctatgtatagctggtgctgtgctgtaggacatctccttgactaggcggatatgaaagggtcgatgctcgctatctctgggcggcttctctactaccaacgcactcatctttctatcgttctctgaccaagagccttttatcgaaaccatcacaatgtcgcttctcaaccacgccgtttatgctgtaactgttctggccaccattgccgcagcagtccccagcctaatcgctgccaggggtgaaaatttcctcgttttcaatggcaatagatcccttttggttgaaaccaaaccctctgcagagaccgcctaagacttgatagccatggccgagggaaatatcgattgcaagggctctgctcggtggaaaaactcggttctggctgtcacgatgcttatcggtaggttattcccagcaatacctacggcacttacctcgagtatgtttttcgctaactcgacaaagccattccaatactggatcttgtagtggaccctgcggtctttttttcaacggcaacactgtgaacttatagggcaggatttgatggacgcctacaatgaacttcggaaccgaggccattgcagccattgtggacgcaaacaaatcgctaacagctgtatgatcaagattgaccgggtcatgggttgctaaatggggctgcgccgtgttaatcggataggaggtgcataccatatacatctatttatggtcacagggtcgcagttttggctttcatctagtcactcatgggtgaatgggcttgcacgagtttgaagatgagaaatgctaccgacacgcgaaaattgctaccgtcacgttgcccaccatactactttaggtaagtctcccgctggccgcaattttcaaccagcctttgtaannnnnnnnnnnnnnnnnnnnnnnnnnnnnnnnnnnnnnnnnnnnnnnnnnnnnnnnnnnnnnnnnnnnnnnnnnnnnnnnnnnnnnnnnnnnnnnnnnnnnnnnnnnnnnnnnnnnnnnnnnnnnnnnnnnnnnnnnnnnnnnnnnnnnnnnnnnnnnnnnnnnnnnnnnnnnnnnnnnnnnnnnnnnnnnnnnnnnnnnnnnnnnnnnnnnnnnnnnnnnnnnnnnnnnnnnnnnnnnnnnnnnnnnnnnnnnnnnnnnnnnnnnnnnnnnnnnnnnnnnnnnnnnnnnnnnnnnnnnnnnnnnnnnnnnnnnnnnnnnnnnnnnnnnnnnnnnnnnnnnnnnnnnnnnnnnnnnnnnnnnnnnnnnnnnnnnnnnnnnnnnnnnnnnnnnnnnnnnnnnnnnnnnnnnnnnnnnnnnnnnnnnnnnnnnnnnnnnnnnnnnnnnnnnnnnnnnnnnnnnnnnnnnnnnnnnnnnnnnnnnnnnnnnnnnnnnnnnnnnnnnnnnnnnnnnnnnnnnnnnnnnnnnnnnnnnnnnnnnnnnnnnnnnnnnnnnnnnnnnnnnnnnnnnnnnnnnnnnnnnnnnnnnnnnnnnnnnnnnnnnnnnnnnnnnnnnnnnnnnnnnnnnnnnnnnnnnnnnnnnnnnnnnnnnnnnnnnnnnnnnnnnnnnnnnnnnnnnnnnnnnnnnnnnnnnnnnnnnnnnnnnnnnnnnnnnnnnnnnnnnnnnnnnnnnnnnnnnnnnnnnnnnnnnnnnnnnnnnnnnnnnnnnnnnnnnnnnnnnnnnnnnnnntgacggaaaaacggtggtaaggcgagtgtattttgtggcagaaaaatcttaataaattctctaactctctaaaactgacaatagtcctaaaacatgacaatctgatggacaacttaggaatcaaaacaaacaaaataaaagaaagggtgtttttttgggcgaaaaaccactgagttagtttttctgcagaaaaaccagcctggtcaatcacgtgacccagctgtatcagggatgaaaaatgacagtattcatcctagattctgacatgttgtcttattggctaatcgcttcataccgcctacgagcagttctgcccgtcataccccatcaaaatccatactcctttccacctcatttctctacaacttcattcaggcagcgttgtatagttacggagtagggagtaccagatcaagttgggtacgtacccgggccgcgcatcctatacctctttgattaacttcgttgaatcaagtgtcatacagaatctctgattgtttccgtcacttaaacagcattatacccctagagatttgcaattttatgaccaccagtcggagtcgggaatttttgctacgctggtcacgtttatattttggattaattcattcatgtctaagtacagcatcgttgaaagatttataggacgccctggggcggccgacaatcttgttggagataatgtcacattggtccttaaagactaggacaaagtaatccggggttaaagctctttcaaatgtaccaaccgtcccagaattctcatggtgaacatttggctgctgcttcacttttgaggccaacccccctaattgggataggaaaaggattttagggttacatttgggcggtcttagctagtgggtctagtggttcttagctcggcattaactgacagctcataaatgtcagatcccgttcgttcagatcccgttggtcaaaacggttagaggggctggtcctgtgggtcatttagttgcatctaaatgtggactaggtgacccgttcgtggatcatacccttacctgtctagggaaaaggtctccgttgtccctagttcttccccatgtagactaagacaatctctgagctggcttattcttctgccttgaaggaggcttttggtgttctccttaatttcccccaggtatcccacttaccattctcgtcatattcaagcttctcaacatgcaccaatcatggaacaagtggtgttaccgtcactattcccttcggcggatgatatccacagtcgccattggcgcttgtggtgtttttatctacttaatatggtttgggatgaactcagaccgtgataatgtgccccagctcctcacacaacttatcccagcaggtcactgcacctgccaatcatctacttcatttcaatgcgccgactgcctcacctgtctagcctcgccaccgctattggaaccagaacaccatgaaacttggagtttccaatacggaagagacgaccaaaacctaggcctgagccagattcagtgtcaggcagcattccccggtctcttccaggacatccagcgaggggttgcgtattggaagtcgcaagggagcatatcaagaaacgatctgagcatggtcccattccgagatggtatggcccgcgctattatctccaacggagaattgtacgtcgtggcgacaagagcaaaatgggatgatcatcggcgcaagatccttagtactctagggtctatccatcgggcactatctgcgtcctcaaatcgtacctcgcaccccacaatcgagtttatcttctcgatcgaagatcgcgtggatgacgttgatgcggccagccacccggtctgggtgttatcaagaaaagcatctgaggagtcggtcattctgatgcccgacttcggatactggtcctgggccaagagtaacatcggcccatacggacaagtcgtacagagcatcatggcggctgaatctaatatgaaattcgcggataaagaacggaagctggtctggcggggtaagttgagctttgcaccaaagctgcgtcggacgctcttggacattgcccggggtaagccttggggtgatgtgaaggagttggattggagcaagaaggtcaacttcttgtcgatggaggatcactgtcggaccatgtttatcgcgcatgttgaaggtacgtttttttttcacaacccaaatttgctatacaaggctgacagatatcgtcgatattcaggccgcgcatactcggcatcgcttaaataccgacaagcctgtcggtccgttattgtggcgcataagctgcagtacatccaacatcaccactatctcctcgtatcgtccggtccggaacagaactacgtggaagtcgagagagacttttccgatcttccgaatctcatggacgaactgttggagaacccggacaaggcagagcgtatagccaataacagtatcaaaacctttcgagaaagatacctaaccccagctgctgaggcatgctactggagagctctgtgggagggatgggctgaagtctcggcgaatgtcacacgcgacgttgaaccaccggttaataggggacttcggtatgaatcttttgtgttgctagacagtaacgatatgttcaagttcgacatgtcgaacagcttttagataacagcaaacggcttaactagttagcttcaatccagactagcttcgtcccttcacaccgacgctccattccgagccttccggtaagaccggagaatatagaacttcccctgtgggtcactagttagtaccgtgaataaacgcactattgacgtaaatatctgctttcttccgtctaaaatttttaaactatacagataggtcctaggagcgttattaaacttggtttgattgataaatacaatctccggctttatctcggttacaaaatttgtggaatctaatcatggtaaaggattacgcagatatagtataagctagagaactaggagtcccctctagtgcggttgtagtaaggctaaaatttatgattagaggatctataatggaatgccgtacaatttgtatatgaactgtcacgacctgcaatagatcgctatcatatgctttatgtacttgctcgcttactgatttcatcgtttatctcattacatagattgtttgctagattgctaagcgagaaggttcgaggtttgcaacgtttgcaaagagtcaagaattgccgtgtaaagaaaatagatttatgtggcaaaaacaaagccaaaaacatacaacagtgaggattcgctggtggtcacccacccaactactaactcaccggcgnnnnnnnnnnnnnnnnnnnnnnnnnnnnnnnnnnnnnnnnnnnnnnnnnnnnnnnnnnnnnnnnnnnnnnnnnnnnnnnnnnnnnnnnnnnnnnnnnnnnnnnnnnnnnnnnnnnnnnnnnnnnnnnnnnnnnnnnnnnnnnnnnnnnnnnnnnnnnnnnnnnnnnnnnnnnnnnnnnnnnnnnnnnnnnnnnnnnnnnnnnnnnnnnnnnnnnnnnnnnnnnnnnnnnnnnnnnnnnnnnnnnnnnnnnnnnnnnnnnnnnnnnnnnnnnnnnnnnnnnnnnnnnnnnnnnnnnnnnnnnnnnnnnnnnnnnnnnnnnnnnnnnnnnnnnnnnnnnnnnnnnnnnnnnnnnnnnnnnnnnnnnnnnnnnnnnnnnnnnnnnnnnnnnnnnnnnnnnnnnnnnnnnnnnnnnnnnnnnnnnnnnnnnnnnnnnnnnnnnnnnnnnnnnnnnnnnnnnnnnnnnnnnnnnnnnnnnnnnnnnnnnnnnnnnnnnnnnnnnnnnnnnnnnnnnnnnnnnnnnnnnnnnnnnnnnnnnnnnnnnnnnnnnnnnnnnnnnnnnnnnnnnnnnnnnnnnnnnnnnnnnnnnnnnnnnnnnnnnnnnnnnnnnnnnnnnnnnnnnnnnnnnnnnnnnnnnnnnnnnnnnnnnnnnnnnnnnnnnnnnnnnnnnnnnnnnnnnnnnnnnnnnnnnnnnnnnnnnnnnnnnnnnnnnnnnnnnnnnnnnnnnnnnnnnnnnnnnnnnnnnnnnnnnnnnnnnnnnnnnnnnnnnnnnnnnnnnnnnnnnnnnnnnnnnnnnnnnnnnnnnnnnnnnnnnnnnnnnnnnnnnnnnnnnnnnnnnnnnnnnnnnnnnnnnnnnnnnnnnnnnnnnnnnnnnnnnnnnnnnnnnnnnnnnnnnnnnnnnnnnnnnnnnnnnnnnnnnnnnnnnnnnnnnnnnnnnnnnnnnnnnnnnnnnnnnnnnnnnnnnnnnnnnnnnnnnnnnnnnnnnnnnnnnnnnnnnnnnnnnnnnnnnnnnnnnnnnnnnnnnnnnnnnnnnnnnnnnnnnnnnnnnnnnnnnnnnnnnnnnnnnnnnnnnnnnnnnnnnnnnnnnnnnnnnnnnnnnnnnnnnnnnnnnnnnnnnnnnnnnnnnnnnnnnnnnnnnnnnnnnnnnnnnnnnnnnnnnnnnnnnnnnnnnnnnnnnnnnnnnnnnnnnnnnnnnnnnnnnnnnnnnnnnnnnnnnnnnnnnnnnnnnnnnnnnnnnnnnnnnnnnnnnnnnnnnnnnnnnnnnnnnnnnnnnnnnnnnnnnnnnnnnnnnnnnnnnnnnnnnnnnnnnnnnnnnnnnnnnnnnnnnnnnnnnnnnnnnnnnnnnnnnnnnnnnnnnnnnnnnnnnnnnnnnnnnnnnnnnnnnnnnnnnnnnnnnnnnnnnnnnnnnnnnnnnnnnnnnnnnnnnnnnnnnnnnnnnnnnnnnnnnnnnnnnnnnnnnnnnnnnnnnnnnnnnnnnnnnnnnnnnnnnnnnnnnnnnnnnnnnnnnnnnnnnnnnnnnnnnnnnnnnnnnnnnnnnnnnnnnnnnnnnnnnnnnnnnnnnnnnnnnnnnnnnnnnnnnnnnnnnnnnnnnnnnnnnnnnnnnnnnnnnnnnnnnnnnnnnnnnnnnnnnnnnnnnnnnnnnnnnnnnnnnnnnnnnnnnnnnnnnnnnnnnnnnnnnnnnnnnnnnnnnnnnnnnnnnnnnnnnnnnnnnnnnnnnnnnnnnnnnnnnnnnnnnnnnnnnnnnnnnnnnnnnnnnnnnnnnnnnnnnnnnnnnnnnnnnnnnnnnnnnnnnnnnnnnnnnnnnnnnnnnnnnnnnnnnnnnnnnnnnnnnnnnnnnnnnnnnnnnnnnnnnnnnnnnnnnnnnnnnnnnnnnnnnnnnnnnnnnnnnnnnnnnnnnnnnnnnnnnnnnnnnnnnnnnnnnnnnnnnnnnnnnnnnnnnnnnnnnnnnnnnnnnnnnnnnnnnnnnnnnnnnnnnnnnnnnnnnnnnnnnnnnnnnnnnnnnnnnnnnnnnnnnnnnnnnnnnnnnnnnnnnnnnnnnnnnnnnnnnnnnnnnnnnnnnnnnnnnnnnnnnnnnnnnnnnnnnnnnnnnnnnnnnnnnnnnnnnnnnnnnnnnnnnnnnnnnnnnnnnnnnnnnnnnnnnnnnnnnnnnnnnnnnnnnnnnnnnnnnnnnnnnnnnnnnnnnnnnnnnnnnnnnnnnnnnnnnnnnnnnnnnnnnnnnnnnnnnnnnnnnnnnnnnnnnnnnnnnnnnnnnnnnnnnnnnnnnnnnnnnnnnnnnnnnnnnnnnnnnnnnnnnnnnnnnnnnnnnnnnnnnnnnnnnnnnnnnnnnnnnnnnnnnnnnnnnnnnnnnnnnnnnnnnnnnnnnnnnnnnnnnnnnnnnnnnnnnnnnnnnnnnnnnnnnnnnnnnnnnnnnnnnnnnnnnnnnnnnnnnnnnnnnnnnnnnnnnnnnnnnnnnnnnnnnnnnnnnnnnnnnnnnnnnnnnnnnnnnnnnnnnnnnnnnnnnnnnnnnnnnnnnnnnnnnnnnnnnnnnnnnnnnnnnnnnnnnnnnnnnnnnnnnnnnnnnnnnnnnnnnnnnnnnnnnnnnnnnnnnnnnnnnnnnnnnnnnnnnnnnnnnnnnnnnnnnnnnnnnnnnnnnnnnnnnnnnnnnnnnnnnnnnnnnnnnnnnnnnnnnnnnnnnnnnnnnnnnnnnnnnnnnnnnnnnnnnnnnnnnnnnnnnnnnnnnnnnnnnnnnnnnnnnnnnnnnnnnnnnnnnnnnnnnnnnnnnnnnnnnnnnnnnnnnnnnnnnnnnnnnnnnnnnnnnnnnnnnnnnnnnnnnnnnnnnnnnnnnnnnnnnnnnnnnnnnnnnnnnnnnnnnnnnnnnnnnnnnnnnnnnnnnnnnnnnnnnnnnnnnnnnnnnnnnnnnnnnnnnnnnnnnnnnnnnnnnnnnnnnnnnnnnnnnnnnnnnnnnnnnnnnnnnnnnnnnnnnnnnnnnnnnnnnnnnnnnnnnnnnnnnnnnnnnnnnnnnnnnnnnnnnnnnnnnnnnnnnnnnnnnnnnnnnnnnnnnnnnnnnnnnnnnnnnnnnnnnnnnnnnnnnnnnnnnnnnnnnnnnnnnnnnnnnnnnnnnnnnnnnnnnnnnnnnnnnnnnnnnnnnnnnnnnnnnnnnnnnnnnnnnnnnnnnnnnnnnnnnnnnnnnnnnnnnnnnnnnnnnnnnnnnnnnnnnnnnnnnnnnnnnnnnnnnnnnnnnnnnnnnnnnnnnnnnnnnnnnnnnnnnnnnnnnnnnnnnnnnnnnnnnnnnnnnnnnnnnnnnnnnnnnnnnnnnnnnnnnnnnnnnnnnnnnnnnnnnnnnnnnnnnnnnnnnnnnnnnnnnnnnnnnnnnnnnnnnnnnnnnnnnnnnnnnnnnnnnnnnnnnnnnnnnnnnnnnnnnnnnnnnnnnnnnnnnnnnnnnnnnnnnnnnnnnnnnnnnnnnnnnnnnnnnnnnnnnnnnnnnnnnnnnnnnnnnnnnnnnnnnnnnnnnnnnnnnnnnnnnnnnnnnnnnnnnnnnnnnnnnnnnnnnnnnnnnnnnnnnnnnnnnnnnnnnnnnnnnnnnnnnnnnnnnnnnnnnnnnnnnnnnnnnnnnnnnnnnnnnnnnnnnnnnnnnnnnnnnnnnnnnnnnnnnnnnnnnnnnnnnnnnnnnnnnnnnnnnnnnnnnnnnnnnnnnnnnnnnnnnnnnnnnnnnnnnnnnnnnnnnnnnnnnnnnnnnnnnnnnnnnnnnnnnnnnnnnnnnnnnnnnnnnnnnnnnnnnnnnnnnnnnnnnnnnnnnnnnnnnnnnnnnnnnnnnnnnnnnnnnnnnnnnnnnnnnnnnnnnnnnnnnnnnnnnnnnnnnnnnnnnnnnnnnnnnnnnnnnnnnnnnnnnnnnnnnnnnnnnnnnnnnnnnnnnnnnnnnnnnnnnnnnnnnnnnnnnnnnnnnnnnnnnnnnnnnnnnnnnnnnnnnnnnnnnnnnnnnnnnnnnnnnnnnnnnnnnnnnnnnnnnnnnnnnnnnnnnnnnnnnnnnnnnnnnnnnnnnnnnnnnnnnnnnnnnnnnnnnnnnnnnnnnnnnnnnnnnnnnnnnnnnnnnnnnnnnnnnnnnnnnnnnnnnnnnnnnnnnnnnnnnnnnnnnnnnnnnnnnnnnnnnnnnnnnnnnnnnnnnnnnnnnnnnnnnnnnnnnnnnnnnnnnnnnnnnnnnnnnnnnnnnnnnnnnnnnnnnnnnnnnnnnnnnnnnnnnnnnnnnnnnnnnnnnnnnnnnnnnnnnnnnnnnnnnnnnnnnnnnnnnnnnnnnnnnnnnnnnnnnnnnnnnnnnnnnnnnnnnnnnnnnnnnnnnnnnnnnnnnnnnnnnnnnnnnnnnnnnnnnnnnnnnnnnnnnnnnnnnnnnnnnnnnnnnnnnnnnnnnnnnnnnnnnnnnnnnnnnnnnnnnnnnnnnnnnnnnnnnnnnnnnnnnnnnnnnnnnnnnnnnnnnnnnnnnnnnnnnnnnnnnnnnnnnnnnnnnnnnnnnnnnnnnnnnnnnnnnnnnnnnnnnnnnnnnnnnnnnnnnnnnnnnnnnnnnnnnnnnnnnnnnnnnnnnnnnnnnnnnnnnnnnnnnnnnnnnnnnnnnnnnnnnnnnnnnnnnnnnnnnnnnnnnnnnnnnnnnnnnnnnnnnnnnnnnnnnnnnnnnnnnnnnnnnnnnnnnnnnnnnnnnnnnnnnnnnnnnnnnnnnnnnnnnnnnnnnnnnnnnnnnnnnnnnnnnnnnnnnnnnnnnnnnnnnnnnnnnnnnnnnnnnnnnnnnnnnnnnnnnnnnnnnnnnnnnnnnnnnnnnnnnnnnnnnnnnnnnnnnnnnnnnnnnnnnnnnnnnnnnnnnnnnnnnnnnnnnnnnnnnnnnnnnnnnnnnnnnnnnnnnnnnnnnnnnntggcttaagtacggctgagcggacgggaagccctattttccacaccctatggtcgtatatactattatgttctagtatgctaactatatcctattgtttaccttttgctacctattactattcttattctagtgattcaactagcttctcttttcaagtctatatcaagtgctgcggctcactaatccatagttcgtgggtttatttcatttggcaagtgaagaacaagcatctctgagtcctaccgacccattcatctccatcttcggctttcagccgcgatatatttgaaaaagccaggaggaaaagaactcggatgtgaacagcaaagatattatatgaaatatagctaactacgcatagatggaaatacctcattttttcgttcacgttcttccttctctttaaccatcttctcactctgtcacaattcagcaacagcacctatcttttctcacgttctaacctacaatcaattcctattttcattaaaccattttagccaatggctaagtaggtctctatggcttctgtagtggctaaattgtactaaccttattagtcgtctccccgagcctacttcggcagaccagggaatcccagtcctcatcccccctatctccccattctatattagaagccgaatggagccctggtggctctaggctcagtaggctcagagaattcatgagctgttgtgttcaaatcattgtaatgatcatttttcggcaatgaggttaacgtgaatataaatcactatatcaatatcgtgtaaagatatcagtcaaattgcccgcattctaaattttatatctgatattggttgattacctgctcaagatcccactaacaggacccttagcgttcctagaatcatacttggccccatgatacatggcatggtccccaggcacaataattattgctcccagagtaggaataattttcccacagggcctataattccggggaacgagaggtggtagagagtacgggcgactccaccaaagtgctagggaggtcgtgctacttcaaagtggcggaaggtaataccgaactgatcatataagagggtggtcgagttggtacagtataagccccttatattcgttcttaccctcccataaattgaggagctaaacccccaatttgctccaggcccaagtattacctcaatatctgtagatttaatatatctcattttggcgctttactgtacgaatctatgaacaggaagtaaatggttaaattgcgcggccgaagcttctccaaatcaccctcaatctgcaactattgaaatgaaaccagtctcgcttgggacaggaagtcctctagacctaagcttgctagcccttttagctcttttctttgaggacatatttgcccaattcccatacagacttaagtccgaccatgagatcctcgctatgtagccctgatcagtagcctctggtagtatttcagtattagacgtatcaccgggtgacaaagaagcgcgcgaccagctgtcagtatcagcagacacttgaggaatgatccactgttcgctacctccctcagcaggagactcttccaggacaggctcgagctcaggctctggttcaggcgattcgacgacaggctctggtacagcctcttcgaaggcaggctctggtacagcctcttcgaaggcaggctcaggctcaggctcttcgaagacaggctctggtacagccgcttcgaagataggctcaggctcaggctcttcgaagacaggctctagtacagcctcttcgaaggcaggctctggtacagcctcttcgaagacaggaaggctctggtacagcctcttcgaaggcaggctctggtacagcctcttcgaaggcaggctctggtacagcctcttcgaaggcaggctctggtacagcctcttcgaaggcaggctctggtacagcctcttcgaaggcaggctctggtacagcctcttcgaaggcaggctctggtacagcctcttcgaaggcaggctctggtacagcctcttcgaaggcaggctctggtacagcctcttcgaaggcaggctctggtacagcctcttcgaaggcaggctctggtacagcctcttcgaaggcaggctctggtacagcctcttcgaaggcaggctctggtacagcctcttcgaaggcaggctctggtacagcctcttcgaaggcaggctctggtacagcctcttcgaaggcaggctctggtacagcctcttcgaaggcaggctctggtacagcctcttcgaaggcaggctctggtacagcctcttcgaaggcaggctctggtacagcctcttcgaaggcaggctctggtacagcctcttcgaaggcaggctctggtacagcctcttcgaaggcaggctctggtacagcctcttcgaaggcaggctctggtacagcctcttcgaaggcaggctctggtacagcctcttcgaaggcaggctctggtacagcctcttcgaaggcaggctctggtacagcctcttcgaaggcaggctctggtacagcctcttcgaaggcaggctctggtacagcctcttcgaaggcaggctctggtacagcctcttcgaaggcaggctctggtacagcctcttcgaaggcaggctctggtacagcctcttcgaaggcaggctctggtacagcctcttcgaaggcaggctctggtacagcctcttcgaaggcaggctctggtacagcctcttcgaaggcaggctctggtacagcctcttcgaaggcaggctctggtacagcctcttcgaaggcaggctctggtacagcctcttcgaaggcaggctctggtacagcctcttcgaaggcaggctctggtacagcctcttcgaaggcaggctctggtacagcctcttcgaaggcaggctctggtacagcctcttcgaaggcaggctctggtacagcctcttcgaaggcaggctctggtacagcctcttcgaaggcaggctctggtacagcctcttcgaaggcaggctctggtacagcctcttcgaaggcaggctctggtacagcctcttcgaaggcaggctctggtacagcctcttcgaaggcaggctctggtacagcctcttcgaaggcaggctctggtacagcctcttcgaaggcaggctctggtacagcctcttcgaaggcaggctctggtacagcctcttcgaaggcaggctctggtacagcctcttcgaaggcaggctctggtacagcctcttcgaaggcaggctctggtacagcctcttcgaaggcaggctctggtacagcctcttcgaagataggctcaggctcaggctcttcggggacaggttcaggatcctcaggggatggccctcgaagaggggattcttctgaaatgatgccgttcagtatctttgctaatgattcccaaaagaattagttcagtctgattaccatatgttgaatatgttgaagataatttaccgtgctgatctttcatagaacataagctaatagatagcatctcgagaatcatcttcatcactgcattatcaaattgatggtcctggccgagaatattgtaaaatgcgtgtaagtcaagccctgcaacttcaggctttggtagtcgctgcaggtttcctcgaatgtaacttggaagccaggtttcatctgcaggaagtcttgaaaacacgtccctcacgacccgcagtatttcaagaataggaaggtccttatctaagtgctccatcttctgcttagcaaggatttcaaggtcagttaggccccaagtccttaatgcataatagactagaacgctcctcttatattctctggcgagatctgatacaccttcatcaagaggcgagctgactgtctcgtagccgccggtatataagaagtgcagcacggtatacccgacatcttcattaacattaggcatgatgatagtcgatgacccaggagaggaaggggtaagctttaggtaattccgaaggaaataagcgggaatgccatattgcttgctccctataatgaaggtgacgagagggaactcgtagggccagtaaataggtcagaaaacgctagttttgacttattcgaagaactcacgatgacaaaggtcgatagtagtcaattttaggagagacctctggggtaaggagtcgcttaggctcctcattcgagttacgctgcttcgttttcttttttgccatgtttcagtcttcaacttcgccagctatcaagtgactctcataaaattttcaaggaaaggtatcaagaattaagatgagaggaagcctgactacatcttatatatgcggaggataagggataagtagggtaatgcaagtatgagttgtcctgcaaagtggtcgaaacatgccatctgtgccctgaatggcaatttagtgtcaaggattgaaatgcagcatgagtcagtagatggcttattacatatttcagctggttatcacttctgaggagttttcggtttgggaagacgaatctgcgccgctcaattctaagtgtgctggaagcaaaatgtgatatccctggtaatcctggactcctatcagttgctgtcctgtcagaaaccttccataatttggtaccgtatcaccgcttccaagacagatggtgcttctaagctgtgagcagcgaattcacgtggtgctataccatccaatggattatgtccaggacacgtgtggttttcgttagcgctaaagtttcatatagtggcgtactcaccacaatcctatgggtagctgaattatcactttacaattcacaaaacaacatcgctcttagaatcacctgcagagtctttcatctatcttttccttattcgccaatctcccattcggcaaaggacagccataccctagaggctccatgataactagacaaaaggtacacacaaggtaaggccagatcatgcaggtatgtgttggcagcccatgcagggtaggacacaagaattttactgatacaaaggcccgaggaactcagcccaaagctcattctccttggctaatataataccaccaacgaagcaaggcaataatgggttttctctggatcgcaggcatacctcgtccgaagttgacagattttgagaagatcgggaaatccattacggaagtggagcatttgtcttaaattggattgaatcgtccagctctacattgatgtccccgaatgcccgcctctttgatctccacccaaaacccctccaaaaaaaaagttgccaaagactcttggcccatttacattgctcaaaccgtgtttcgtcatcctgacaattcactcgcactacttttccgttcgctgtacattggaaacccttcaaaaagcattcaccaatttgacttgataaccggataaccgatcgaaagaacatcatgggtaaccggcaagtgagcaagtaatgaaagtcactatttacaagctctgttgctgattaagcccccgggctgtcacttggatataggagtgacaattggaagcattcagcttgttgactgacgagataatttagtttatgtctagcatatacgcataaatccaatccatcctttagtttgctaatattcgaacccgttccccgattccaaagaaaaagaaaagaaaatacaaaaagaaaagaaagacgaaaaaaaagttctaaatctgcttcccaaatggctcccccttcgtcttcccttccgtatgcggaggcagtttttcacgatacccaaactcctgctatttaatatgaactcggttgaatctttcataggtcttttcattcttattacgatccacattggctaagcatttggtaacatccttttcaattgaatccatggcgcggttcttgaaccacgcagtttgtccctcgtcgctttgtttcgtgacgggggtgtatatggctgtgtggcatacctcttctgtcccggtcatgttgtcggtcttgctcttccaggggcagcggtaggtgtagcggcagtagaggaagcctggtccgccgtgggacattgttgttcttgggtctgggttggttatggaggaaatttatactcccaagtccttcaaggagagaattttacgctatgtgaaataaagaagtataggagaagaaacagaaacaatattgagcaagttgataagaagtagaagacggtatttgagccaaggtgggaaagactggagaactatacccctcatttacttctaaaagtgaggggtaatcacaaggcggtgtttgaagcgctactcgacacgtcgctgcccaaatgagatttgttgggcagtgacgtgtcgggtataggaaacgagacatatggcagccgatagcgctcatatatcactgacgaaattcgtaccacttctccgcataaagctttaggctagactaaactattggccagcccgaccattttgagtgaggctcaaacgcggccattagtcgggtggatgccgcccgggtgagaatttagtgagcgccgcttttgagtcgcgcggcagggagtgagcaggctgagttgattatagatgggaaggtgggccaggtgagatcttccctgacgcgcgattcgcgcgaccactcgagccgagtaaccatgatcaaaattaaccttgtaataattggaccatcacatacccttcaggcattagccatcttagcacctatacatagccacaaagcaatctgtaatcaataatcttgtcacatcaaatgtgtgcctgatttgttgtttatctaagcgcgatccctacattcagccataaagtacggggagaaggctatatggcagggccatatagtgagaagcgggtctaacccgttacaagagaagagaaataggaggagaggctagctaggactatctaccatatggaggcatcacgtggaatcacgtgatcctcccaataagatctaagcgatctagggtagtgggaaatgtatacggtgtaggactccctacgtcggtcaccaactatgcggctaaaaggtaaggctacccgttctaacccgaaccgggattaataacaaatagccaactaggcttacataaggttccactgctaggaaaataactcaattaactcctactagctagctagatcttagggggaaagatgaaggtatttatgtctacctccatctgccctctgataccgcctcaaactgggataaaagagtggatcccagtttggcccctgacaacgctacacgaaataatgcagaaaagggttgcaaccttggaacaactaactgccccacttggattttctactaagcctatctaggaaataggcagcattatcattaaacaaagaaatgagtttgctactaagcctatttaggaaatgtttgcctttgtaggtagagcttcagtatttatactcttcacttctggcgtttcctctcgaaaattttcttcctctcactatcccaactcatctcttctcaactcttctcaactctcctcttcactcctggcgtttcagcttaagatttttcttcatctactcatcgtaactcaaacgcaactcaactcagcttggctcattaagctagcttaactcatctcaactcaacttgtccttcgtgtggcttgtctaagatgacaccattcaaagttgcgaagaaaagaacgccaactaaacaaagaatgaaagatgccatgctcgacctccacagcaagacacaaaaactatccttcacccagctgaaggcctatattgaaaaccttacatcaatctttgaggaaggccagtttgagcgaccaacgatcgcaatctcttccctgaatatcggcgacgtccaagttttactcaagctcactcattcattggacaaccttgagttctgtaacagaactccggttgaactgtcccccgtctgcggtacgtatcccttaaggaatgttcaagtcaatgtaacacataactgatttgaccaagctgaatggatggacatgacgagagacgcgtttggcaaaagtggacccaatgaagcgttaacccggatcactctcaacaacctcctcatcttcgcccatcattttgtcacctcgcaacctagcaccacttcctcagacatgaacatgaacgacttgaacttgaatgccgaaggcctctggcgttatggccccgtcatgcataaggacaccaagcacgaccttgttgggcgccctgactatagcctgtggtacggcaatgaagaggatgtggctgtcagtgttgttgtggttgaaacgaagggagttgaatctgtgacaagcggggtctctcaaactctcggctacatgggttgcgttcacagacgtcgaaaagacctccagaagaaagatgcaactgtgtatggtgttgtgtctgatggccagtgttggtggttcttgaagattaacaatgactcggaggtgagtaaattataccatgaaatcatacatattctaacttgaatagtggtcagagtatatcattactgcccgtcacggaaattatcaggaggtggtaggaatacttgtgcatatgttccgaactgctgcgaccatgtctcccgctcagtcagagggaacatcacttcagacccactcaaaggaggcgtctgctgaatcatatatggagtttgatgaggaggcggtggaagatgacgatgaggaagaattctgattgctctgttctgtcctgtccctgttcttttctgcttcttttttttttttattcttataccctgattccctcgaacaaaagtttttttattttctccatatggattccctttgtatcctgattccgcatgatcatattcaatcggctacacgagtgttgcagaaagtagccatacccgatctctagggcctcaccgagttcttcaggtcctggccagacactaaggtcctttgaggagtcgttcgagtattgcgcttcaccgaatcttgtccttttttttccttgccccgttcgcactatgcgccgatcaaccttttaaatattggtgaggttagggcgggcagtattagggtgttcaaacttatgcaccgtcactgtatatcaatggtatatcttggcattagagtccgagaaccaattgaagagtgtaggtagtgacaccagtttcgggacgcaatataactgttctaacttctcagggattattcgtgaacatttcatggatagatacaatacagatgaagatctaatagagaaaacactgtatgtgttgatggacgcgaagagaaagagagagggggagcgtgcaggcaaactatccgggttctagttatcttatactcttggttgaagacgtattgcggaactaaggggtctaatgaatgggttttcaactctctgtatttctgtatcggctccgctggcaatttatagttaactagttagtatctagtactatccaatagaaaccatgcgatccttatagaatctcaagacgctcctggagtgctttcgggatattctgttcggagaacatattttagctggtaaagaaattcaaagaaaatcatggcagagtaagagaagcgcctcggggcttgactatttgtatttttttaggactgacattggtttggagtgagttggcccctatcacctcaagggtgagaattgtcaccccgttctcacctctctcaccccagtctcaagacttctcacccatatcacccgaactcaccctagagtgccgcttaggtgctgagggcacattgatcatcacattcgtgggagaggtagatagagtgagagatttaggttgtataaatggctgagtacaacaatgataggcagggtgagaattgggtgagcgccgctttatggtcacacgacgggggtaaaaaggtgtgctatagacagaataagaatctgggtgagaacccggtgacaatcgccctactaattgcggagcgaagcgaagcaattataaatcagaaggtcgtacgtaccccggagcgagatttatgctggaatatacataccgcctataagaatggtacaaagatgaaagaattaatcactttataattctctccgactattccgacgggtggcaaatatattcctattttttagataatgtggctagatatcgagctaacataggcttgtaggggtcgctgtccttcatgcaagcaaatattttcttgtacttttcctccgcttccagcataatgcgctcctcatcgtcaaatctgttatcatctggatccttccaataaagcgttcgatcgttattatctgcccagtcatccactacctttccatttggaataggagtagcaatgccttcaaggatcttcaatgatttggaatccctttcgcgcgatagtcgttcaagttgagcatccacatctagatcagactctaggacagacgacttgaaaccatgcggcccctctccccgtccataaacacacagagattcgagattgggaggtaaatgatcaattagattgaaggattgaggcctgatccgaccatcggggaatcgatcccggctggatcctacaccccgcgcaagatagcatagagtgtggacaccgagactgagactcttgagtttcgggaaatctttcaatgagatacaggatggtggaacttctagcttgtgagtggctagatcacgaagctcatctgcgtattgttcttcataaaatttctgttcatcctcatcgagcccttcgttctcatccagctggtaattcgtatcataaaactcttgccaattcgtacaagattccatgtcaagatccagtacctctagggtatgtcgatgaaaccaaagggactgaagtaatggcaccacgcttagtatagtaatacccccttccgggtcctttcgcccatctacggtgaaagtgaagctctttagtgtttttgacgactcaatgattcgacaaagatcatattcctgcatcaaggagtgtgtgaagctaatcttgctgtaattggcgcagtgcggtggaagtggtagtcctgcgttgttatcccacgatgctaatttgaaagtgacggactcaatagctggcagttttcgtaccacgtttaggcgatcgtagtatggatcttccacatatgtcgtgccctggtttcgagcatcatctgggtggaagttgatctccttgagattttggcagtatggaactgagccgggtgctgctttagaagctcgctggagaagtgacttgagcatgttttgagggaattctatgggatacatagatagggattcaaggttgggggcatttgcggctagcatcataataagcgcatctctgaactcgattgctttcggataagagggagacctatttcagagtaagtcatataacattaagagacgtgcatggagggaaaataattacctaaagtagagcggatcttgccaaaggatggataggatagattctctatcctggactttttctacgccggccttcttgagggcctgcttgagtctgtggatatcctccggagaaaacgatcgttgaggaacgggctcggattcgtagggagaaaagccggagcccgtttcactcccatacaagactaggcgacgaagatagcctccgagagaggggttggccaagatttcaagcagcatgttctgaccagcctgcagctgaactgtaaaactctcctgtccttctcgaccaagctgaaattcatgatatttttggcgattggagacatcgctgatactatgcagtcctcgattttggtgcgacaaggccacaacatcccccatagtagggagactgttgataattttgacgagcacttcaggaggaagattttgtaacggcattcttcgtgatgtgagacttctcctgggaaaaaaatgcgactgaaaaaagcggaacatgtgtaaatagttgtagaggaaagaaactgtcaaggaatactccgtaatgatacatggtattcatacccgaatatcaggtgaccgcatgtaagtacatactagctatgaagccttggcgctctattagggcttgcaactgaccgcatatcttttgatttattcatagtggcaatgagtttcatctagagagactgataaagtatgagcgacaagtagaaaattacggttccaggccagttcgtactaacgcacactctcatttctcaaatctccatgctttcaaaaagaaatggaacagttttaggtatcaaacaagcatcttgctccatgttataataaatttaaaattttaatagtcatcatcgatctctcaggatctttaggggttatcaacttcggcacctcgatgctttgggcatttatcgttagctcctcgatggccttgcgacaatggcgctatttgctgtggaaacgcctgcgtaggccagcggagcaaccatcaacttctgtagagcacactgttgggtcaacctggctgcggtgcggtagtagtcatgatcaaatactttccagatggcaggtggggattccgattttcctcactgcaatagttacatattattagttggtttacttagaatgttgtagtcatagaagactcggtctaaattttcaggctttgtgagtcaggacatgggcccagggggatcgacctggatcctcgaaacaagattcaagacaagattcaagatttcatcgttatattaagttagaaaatatctagggtgcacatttatggctaaatctcaaaagaagggaactctgagcctggaagcgccactagttgcggtggttgaagtagcctcagaggcagcccgagccggtgtggtggatgtcatcgagttcatcgatgcagtcggcgttgagggtgttgaatcggccattttggtgctaattgggctggttgaagatgaaatatcaacgacatcggtctttgtcgaacttgcgctcgtgctagcggagcttgcatcacttccgccatcgccgcattgaaccacagtctcccatccaccggcaaaggtttcctcccagtacgatgattggttaccaagaacaaagtagctgaagaaatatccagagccaggttgcttgtgtgcgttttggtagaacttgattgcacactcgtcgctacatgggaagtcttctctagcccagtcgtcactagcgggataagtcaagaagcagtaatcagacctgcgagaatatcaacatatgcatataccgtaaggaaaccacaatgtatcgaactcacccacttttggcacaagcttggccgtatttgtactggaaaacctcgcccactgtggcaacgggagcctcgtaaatcaaattattgccgctggcaagtccagctaggtcgccatccttgctgcacgcagcattaacattcttgatgtactgcgacaatgaaacactgcatgtcgctgtgcacatagcttccaaatcggaagattgcgggtcaaagtcaggatccatagacgccacgatcttgagtagagtttcatcgcagttgatactggcgctgtaggcctctttgcaagcctgtgatgttgtctttgccaagtccttggttgtatagtcccaactaggaccggcagtatcgagactgaaggtagcagtcgcctgacccaaagcagcggcaaacgcgaagaggcataacatgatgctggtggggtatcgttttgttaagaattccaaagagcaataaaaacagatgaaaggtgagaaatgaggtgcgtctccggcgacagaaagaatagactccgtgcgaaagtgaactggggtgttcgcagcctataaatacccagaattttcaacacttcaacagctattagcgaacttagttaactatggagctgctattacaaaagtagatagccccaaattttcaggggcgattccgaaatttaagccgcaagacccacagcgaaaagatcggatggggccatagatgaggccaaactgatgtttttgatgtttttttgagctgtgcaggactaagaatacgtatcacttctaggatatacagtattcccaggtgtgcacggtgaagtaggtaaactcgctgtcgattcggtctcatgtcacgtaatggcggaaattaaaatctccacatcgagatgcttagttagtctcattttcttaccaatcagatgtcctcgattccatcccttcctctatcgcagcgatttgattgatcatccgaaactgcctgacagtagtgctgcagcctaggggactggcactgatcagaacagtggaaagacagcatctgggaccgggtacgtcgggtccgttaataggcagcccttgtccagctttttagaagtatcgaaatctgtccaaggaagaatatgaaacgcctttttattagagaacatgagtttccagtggctgtaaagacagagagattattgcaaggaaatgatattactataattttttattcagagttattcagagtacgttgaagagaatatgctgtctacataactatgacgaaatatataagtgaagggcgggcgcccaatccatgctgaattgattttgcttagcaaaagcccagctaggtctcatgggctgttctccagatatctttatcactcagcttcagcttacaaattaacggaggcttctcccataataagtaagaacgctgtttgtcccattccccgcttttctcatgaagtttcaagtcaaagctccaaagaacccgtgcaagaaccactcgtgactcgctatatgctagttctctcccgatgcagttccttggtcccactgagaacggctggaggatgtctcgattgtcgttgtagaaaggcgaggataggtcatctctggcatcctctagccaacgctcgggcataaacttgtctggagcataaaagttcatgggtgactgatatgcggcatattgatggaccgatactttcgtctgctaaacatcagccattgttcggtggaaagaaaacaggaatatcaattgaattacggtgcttacatttcggggcacgacgtagcccgaaatattggttggtccaggcccaagcgttatccgctgctgtccagagagcgctggtggataaattcgcaatgcctccttgagacatgcgagcatgtatggcagatttgcggtgcttgagattgtgatatgcttctcggtcttcatagcagatcttatttcacgagtgagtttttccatggcgtgtggcgttcgcagcagccagtaagtaattccagaaagtaaagtagctgtcgtctcgctgccaccaatgaccaagacattagagttcgcttctaactcctcctcggtaatctcgttgtttgaatctccgcgttgccgcagcatgctgtcaatgaaatctgtgcattctctgtcaccctgaaattggagacgtttctggatagtggctctgctaaattcgatttgtcttttccgtgcactcatcaggcttttcgaatcaacaaagagagacaatattctgaacaaaaacggataggcatcgttgaagctcacaagggacatgcctcggattgcctgaaagatggtcgatacccagtaatgatatttagaagattccaatcctccaaatggctcgccaaaggcgagatctccaagtatgtcgaaagtggtcaagttgtaccattttaccatatcggcttccggaatgggcgaggcggcaatgattctcaacttttcaatcaagagatccacatacttcgtgattatgggctcctgggattgcaggcctttcgcagaaaaggcatgtgccaaggacctgcgaagacgactatgatctgcatcgttggcgctaataatgtcggacggattactggttgaatgcagcacctttggtagttgtcgatggccatgaccatatatgtctttccatgcctgagcggtgatgaaagagacttcgtttgggccaaaacgaacgacttcaccgtatctttcgtgaaaatctcgcattttggtttccaatcgaccctgggaaagggcaataaaacgagtgataggaaaggcaacccatattttcggaccggggaggttgctaagtggatggaaatagagcgtccgaatgatatttaagaggaaaatgcagaaaaagagtatagcaaggaggaaaatggttgtcaacatgatttcgacggcttgttgccttcaggctcctggtattgttcacaataacagaagactcaagaaaagaagaatatatatttgtgtcctaaagttcgagatacaggatatatcaatatatatggataactaaggtcatctttatttcaacctctataacaaattgccatacgattgatagaaccctcttggtatgttgtgcagaacggagccgcctggcatcggatccgacgatcatcggagccgcaggaaccgcattgaccaatgaaagtacgtgactccacctatgtcttcggcttaattctcatccaagccctatatcctacagaaataaatatacaacatttctgggagtatcgcctatactctgaaatgtccactctaccgacgctcgtcttcatacctggcgcctggcataaacctacatgctacaacaaggtcatcaagctcctccaagaccagcataagttgaaatgcatctccataactctgccttcgacgacgggaaacccagctgcaaccttcaaagatgatcttgatgctgcacgtgaagctgttttgtccgagacagtccacagtcgcaatgtcgtcgtcgttgcgcactcctatggcggcatggttggcaatagtgccatcaagggtctcacgcagccagacttcaccgaaacccaaaatcaaatctcgacaacgggctatgttattggcctaattctcatagcctctggatttaccctaagtggacttgccttcatggatccgtttttcggccatccccctccatcctggcgggtcaacaatgagaccggatatgccgaacttgtcacttctccgcgtgagctcttctatcacgacttgccagcagacgaggcagaattctgggtttcgcaacttactacgcaaagcctcaaagcactgttcgagggcggggaatacacatacgccggttggagagatgtacctgtttggtatattggcaccgtcgaggaccgaggtttgccggtagtggtacaacgcataaatattggcatggcaaaggaaattggtggcagggtggagcatagggagcttcaaacgagtcattcgccctttctgagtcaaccagaaatgacggtcatgatcatgctagaggctgttgaggcgtttacggggaagctaggggtaaatcaagctacagaaaatggcctttgcgatgcgatagtagcgccgagggccatgatcacgcagcctttcacatggttcagctttggactcccgctggttattggtcatatattaggaaggtgtatacttgtatttacttgggggaggagattctggaggtctacttaggtagaatcaattaatgtatttttggtatcagctcaacggatgttcaacaaaaagttcaaggctttctgttaggttttgatatacccgttagaagtagcgatggtgacaaaatgataacaagatggaaagttcattgaatactacctcttccgacgatctattgaaaacggtccaggggatatctaccgcttgttataacgcagttcttcggcataaaagacattgtcagattaagcggaccatagaactatcagcaattggaatcattgctagcgggtattgcctacattatgcctatttaagaattgaagctgtatctaggacacctgtgcatcccccaagcctcttttaagctctcacctgtgcgggtgtcgggaggcttttgttgggctctttgaagaaggaggagtcgaaaaagttcatttctcgtatggacccatcgagcatattctctgccatagagaactttgacattatggccgatgagagttccccagggacttcgggatgatatttgagcacctgaatatccacttgtgactacgtagtcgtgtgatatgccaggaattcaccctttgactgtgccgccaagctgatttcgttcatgtctatacaaagatacctaggcactacatgtatttcctcaatcaaactcgtatttgtgaatgtaatagttatcttataaggaatgttacgcgtaccgaaagaaagaaataatctagtatgcttccatatcataaaaaaagtaaatgaacagttctaacagttctagcagtcaatagaaattaacattggaagaggaaagtactgactaccttgtgtattgtaatagtcgaccgtaatatatcaactagcatcattggtctagtggtagaattcgtcgttgccatcgacgaggcccgtgttcgattcacggatgatgcactataatttttttattttttatacaaaaataagtacacctcaccgttcgtagaagcatcctaagctggacaatatgtagctcaatgaagcgaaagctgttcaagattttacttgacagtttggtggttgggtttttggaaaacacagaccaattagatacttcccgttttagagggatggatccttattaggattagcccactgtgacagtagtgaaatcgctgtaacaatagtgctctccgacttgatatattacaataatcctcggtggattttttcgaatagagatgagcctacagaatatgagactcgaggaactctcctgatttaatgcctttctacctaagtttggacaatctgcccggcttcaagtggatgggcccaggctttctatctatctctacttaggctagcgacatcttcctgactttgacactctgcggtgcatttgaaggcgatcatgttgcctttccgagagagatcagcctcttgtggtattctcagctccccgttaagccttggtcacatatcccagccctgtggagcaacttttctcgattttgcccgcggggttcctccgtccccgggggctaggtcagtcattccctccctgagaagacttgtcctctgcggtatcaccttctgtcaagctcgaggggcttcgggtcctcggattcggagggggacagggacaatgcacggtgcaatcgattgcgaaagcgcagtcgtcgatcagcggagggaaattttggaatggcactcataattgcatgtaggtacactgagatgacaagcgaccatatggcgagcacactcagcctttatgcaaagtcggtacaggaaaccagaagtgagcgctctgccagctcgcaaccgggtgttgcaagcttcactgtcttccacctggccctgccgcaattgtcgctaaagttgaatatgtttcaaccactcaggcacacagcggtcaccaacttagtgtggcccgcccaataaatgatatgcgctagggctttggcagaagaagtctcttgtactgatcaaggcaatttcgagaatgactgtaccatccgaagcatactgacgtattttgaggagccgcctgtcaacaaagaatctgcgcgccatagtgttggcggatttgatgctttcaactattccatgctagaaaaatgacggatccgtcaaattctgaaatattgatgggtccaagtgatcaaagctgaaattgtcgtcatccaaaaaaccgaggccaacgtcgaaggctgtaggagtgcacattatttcctcatgcctccaagcctcggcatcactgtcgccgccattattgcttagatctgtcgacatgttgcccagaatggtctcacaatcattcaggctttcgagcgcagcattttccatagcctgttcgaccggtaaaccatcaagcatagcctcagctcgagccgttgctatcctcagaaacaaataccctttcacatttgtttctccttggcacatccggtcctttgcatacctaacaacccgatgagcatctttaagtaatggctcttgtcgggcgcgatttcttctcttggccagaattgaaatatccgactcatgacttttgtgcaattccaggtatatcatcaatgcaccacgtgtgatgatgtcccgaaacataccacccccattgaccagcaaccggctatagagatcataatcgaggagcgatatcaaatccagggcaacctcaagacaaactttatgtgagtgtgcatagagtgggtttcgtgtcgcctgtatcgcgtagttgaagtgaagacaaagaagaaaccgattcaggagatgactacaaaagctatatgcaaattggcttcccaacgatatatgctcctcagagagattgtgagagatctcaaccgcagctttgcgacagatcgaagccagctcatttccaaggtctaaaaccaaatgatacgagggttcttcctgtaagctgttgatgaccctggtggccctaagtctgagagagaaagaactggccaacacgcacagaagcggctgccgagtcgagctcgtagctatagtttcccggtcttcgctcactgcagaatctaggtcggcatcttctattccagatggcggcatagtgttgtaatcgctctcggtaatcatcggggccatccccgagtccaatgccgcctgaagattcatctcaaggatggtataccataatcttctccgaatctctttttgtcggaagtccatatcacccagatagttgggatcctgatgtaggcccatctgcatggccatcctcattagtgatcccgcggagacccagactaagtctgctcctattcggtttacctggcgggaaaggagtaataagcaatatatctgaatgccttttaatgtcaagcggtctttctccaacggtgcggagagccatgtttgggcaatattgatccaagaaatactcttttcggccaactcacggcgagtttcaccatgactgtgcaacggaccagcggcggaaattatgagaaggagctccacaacgaaggagctctttgcgctttccggatgatcgatatagcgttcatagtccgcctggaacgaagagcgatgaagaatgcggtagcatgactcaaatgttgcaaagtacagttgaacgagatcgtctatgacttgacgttcggggaatgagcggtgaatttcagcgggaaggctctgtctgtttgggcgctgcttcttgatttcccgggccagttctttacattttgccatcttctgcgacataagcccccggttcgcatcgatcggttgttgaaacagcgtagtctgatatgccatgactggccctagaatggacaattcggtggccttgggtgggctgtcaacaaggggccgaccatacggaacaggaagagaccatcacttaccaggcgctttgtactcatccaatggccctgtccaaaaactcgagtcttagattgggtgccatggattcggccagacggagcaggggtaggtggggagatattgctagagggggatccgtcaggtattatcgacgttctgtgttcctgctgcttggtggcttgactttcgcgcaaattatggtcggatgtgatgcgtcggttatctgtaaacgtgcatgacggggcgttatgcgcgacacactggctgcaagggttggctcggtcgcatcggaccttgcgacggcgacactcgacgcaagaatgagccgggcgccggcgttttcggatgccactttctggacttttcgttgacaattgcattttgcagatgctattggtcccacttctactggtatttttcgtgtataagttaggataagaactcgcgaactcggtgaactgcgcgtagtgaagtggctcggtgctaaatctataatccgatatctccgacgccaagacttaggtggggccctggcttagaactagccaattgtagtagatagaaggcatcggtatacagaagggtgggagatctgtagtaggggaaacagggcttacatttagaatcaggagagaaatcactcattgacattgcatatgaagatgtttcgaaagctgcataaagatgacatttgcaattctctcgctccatgcagcttcagtgatcttcacataccgactagctctaattcataccccatgtggctcgggaaacaatgtcctatcgaattgcgtagaaacaagaggtgcgctagacacaagtacttttagcttatcatgggcgagggaatgccctgtgatgctatccacttcagtgaaataatcctcggccgtaaggctagaatttaccgatgaggccgatagagccgattacgcccgccggtcgactacaatgataattactggcagggtaccttctcggttgatagcgtagaatataaataatcagctagttattttcatcagtaccagatcataagttatcttctctgatttaaccacctgcaatcttgcagccgcagcagcaaggaaatacccccccccgatgtttctccagtacgtaaatgcgtctttccctctcttttttttacaaattccttcaagggctgctgaaacagctagatgcatatggcatcctcgctcggcttcagaaaatgtaccccttcatgcaggcagtcacttacacattatcagggcgtcgaaacgcaacctgagcagtagacgcctcccagctctgcaatcaacaacaatgcccctcaacgtcctcatcgtgggtgccggcgtctgcggcccagctctcgcaattcttctccaaaggtctaattccaaacacaacatcacggtcgtcgagcgttctccctctttgcggtcgataggacagcaaattgacctgaagactcaagctcctcatatattgagaaagatgggcctcctggatgaagtcaagtcacgctgtgtgaacgagactggttttgaaatggtggattccacgggaaagcaaattgctttgtttggtgctgctgcctccggtcaacgtcgtcccgggttgacaagcgagcacgagatcatgcgtggtgatttggtgcgagtgctatatgatgccagtatcaagcaagatgcagagctaaagcatgagtcgggaaatgggaagggagtgacatatgtattcgacaaaacgatcacagccctcgacgagaccacggaaggtgtcgatgtcactttctctggtgggcagaaaaaacgatatgacctcgttgttgctgccgacggacaaggttcgcgcaccagacgtctcgcctttgggcaggaggttagcgatgcagctttcaagtccctcggcgtccacgctgcctactacagcatcccacgaattgaaggcgaaggatctctcgcaaggggccacttggctccgggaagaagaatgatgataaccagaacgagtgatcgtccagtcaccggggtgttactcttcaccatgaaagaatcgtccaggctaaaagcatcttaccagaagtcgttagaggaacagaaagaagcttttgccgagatgttcagggatgccgactggcagactgatcgattgctcactggattgaaggcttctgaggacttttatgccaatgaggttggacaaatcaagatggaacagctgtctgctggccgagtcgttctccttggagatgcgggttactgccccagtccttttacgggcttgggaaccaatctttgccttgttggggcgtatgtccttgcaggagaattggcgcggcggggcaatgacatcgctggggcactcaaatcttatgaagagaagatgcgaccctttataaatgattgtcagcgattctcatctacaaccttcggcttcttctttccatcttcgcagctcggagtttggtctatgcaaagagtgatgtgggcagtgtctaaaatcaatgacatctttccccattcccaacaagacgactattggaaaaatatcccggagtatcccgaattgaatctcgcatcttgattgtatcttccacgtcagggatatgtcgatgtatttctaatctttttgtcttcattcttactgccctgcaatatatgcactcattcatatgttgcttaaccacctgctcaagatctgccatgttgaatttggtcgcccattccctgtcaatcgtgaactgggtcattccatcctagacccgaccattgcgaaggcttcaattagaacctggttttgacgcaataaattgtaaagcattaagttcatatcttacagttacgatattgaaggcctctatggcagaaaacaggtcaatggtcgttacagagattcattccagatcagtagatctataccggtccacgttgacgatgatgaacccgcatttaggggctaaatgcattcttagccgggggttatgtgatgatccaggaaggaacgtacttgctgaactgacactcgcacttgccgcacctacactctcgctccttccacaagtagcattgggaataagcgagaagaactcgacttttgcatcttttgcaaatttgaaaaggggaggaacggccgcacagatagtttctcttttcctttcttctcctgtacttagaatttggatgaaattgcactcttttcctctggatagatctggcatgtaacagatactatctaccatctagcattgaaatgcagtttttagaattaaattatctctcttattggtagtggtagaattaatatgaatagctttatgtttaacagatcaggttatcagatcattgtactttcggagaggagattttggtttcttgaagtggtcggaggcaaagacaattttcattgactgcattcagcaggaattcattcaatgtacgattccgaggtatctgattccggtaagcaaagactggcttttattgacaaattccccgcgaatttggagcaggttcaatggctcagttgccattgggaatgcattacatcatgtcaaatactttcaaatgaccgagaatttctaacttcgaatcaggtgtggatcatcaattattgcggagcttgttgacactcagatattgacaggtaggttttgtgcggtagagtaggtatgttcgccgacttgcgtaattttctctcctggcgggatactggctctcaaatcaagagtgatataataactcaatctctagctcacgatacattaacttgctttatcgtacaggtggcccgaatgccaacgcagtaaaaggtacctaatatgcagccgataatgccatgccatccatgcattttcatcataccaagaacccggacatttacacctccatccattctttctcgttctcgtcggcaatactctcccggtatggatgtttctcaatccattcctctgcaccgacaactgtcgcagacttctcatagaactcgctaagcacctcgttcagctctataaatcattaatactcgtccaatccattcccgtgtcttgttttaagactcactttcaatttccatcgggcttgaaggttgcagtgaaaagcgagacgcgccttctctccatagtaccagcgcggacgggatgggagtacctaaaattataagctttcaaacaagattgaacatggaaaacagcatacctcgtgggacgcagataacagtggggtccaaacgacatttcccgtcggtgacttcttcctggtaccgctcaaaatcaaagcgtagcatttgctgcataagacgagagttcggcatgaagaccggcccattggagtctaataggtagatggtaagactctattgcacaagtgctagacaggagtttacagacaggggcttgacttcgcgatagtcgcgtgaaccaacccatccttagacacgctgactgcatccttcctgtggcgggtctcgtcctgggtcacatcatatagtgtggccttgcgatttagctggtatctatacatggtcgcggggaatgaagcatgggtggaaaggagggagaattttcgcgcttggttgatgttcagccgggcagctggtagccagtgagtggcgagcatggttgctagagtgtgttgcaaggtaatggatgttaagttaaaggggcgaaattcttaagtggtgtgtgtggtgtgcggttaaattaacctccagatatcgcggaaattggaccgcggatggggaaaggaacacgggtccatgacatgacgcaatacttacatatgacgtcgaggtttaagaggatctttctgcaggtgagctctacgtagcccgatatatttctataaaacatctatctgaatatctataaactctcgcatgaaaagatccgaaatattaacatgggatgcgaattgcttcacacgcttctgtagatttggaacttctagaaataacgcgccgtattgtaatgaaagtcacatgatcgggaatgcagtaatttactacgaacatccgacactcaacgattacatacttgttccaggagataattctaccatttgaatttcgatatcctccgtggaattgcttttgaactacggagtactccgcatatatctcaagtctctccacagctcattcacccataacccattcccgcacaagccgctattttatgattctcttccacttcaagtttgatacatacgaccatagggtgtggaaaacagggcttcccgtccgctcagccgtacttannnnnnnnnnnnnnnnnnnnnnnnnnnnnnnnnnnnnnnnnnnnnnnnnnnnnnnnnnnnnnnnnnnnnnnnnnnnnnnnnnnnnnnnnnnnnnnnnnnnnnnnnnnnnnnnnnnnnnnnnnnnnnnnnnnnnnnnncgccggtgagttagtagttgggtgggtgaccaccagcgaatcctcactgttgtatgtttttggctttgtttttgccacataatctattttctttacacggcgattctcaatatgcccttgacatctgagcggcactcgagggtgagcgcggggtgatgggtgagaagtctagggactagggtgagagaagcgggaatattgtgatgacgaccgtgccacaactctcaaaatgctttatagtctcctcggcgacagttttgcgcagagggtatgtactgcccatggtcgcggctgcaacgcaaaaaaagagagcaggcccttggtccctgaggcgcgcggctgtcttgtcgtgtgcaatatatatgaaaaggaacttgggcaccaagtcaagatggaatgtcgtaaccaagcgttcagcctcggcgtcacttaaaagctctcactggatcgaggccattggacgggtcactagcagcatctagcagtgcggcaatgtccgtcgagttcagttcggaatcacgagaccaacccgggtcgttggcgagcggattgggctgcccattatgtcgggtcaaatcagccagctgtgatgccagctggtcaaccttctgacaattggcactgtggagattgaatctggtaacagatcaagaggtcgtcaatacggataatattattgtagccaatggaaaaaataattctagtgcaggagaacatcacgatgtcaagttttcaattcttggatgccaacagtgtgcgttcgtgagatgatacttcaagtcatccgtgatatgaaatatggtctgatcgatatgttctttaagctagttggtcaactgcacgagatgaagcgacagggattgcccctccttctcaccacctccagccatgttctccaaattcgacatcctttgccatggtaggaaggtattcatcgtctttcggggagtctaggaccaggaaaaacatcacgaagtaggagtccttccatttcatctctggggggatacgggcagcgcttctgaaaccggagattttactatacgttattagcttgagatcataagagatatagtcgaacatacacagcacctgtcttcatatcgagtatgatctttgacggggacgccggaaccggttgatatccaacctttagaacgtccctaattctagttagcggcaagtacatgataatcaacccactgagtaacaaacatataggcctttcggaggtttgcacggacgacatctcgtttcccgcgggagagattccagaacttctgaatatcaagaggatcccctgcgaccttttcccatacaaggtagaggatatacccgccggggacaaggtcggtttcttcctgcgtgctggcatgatatccaaggagtttaggggtagtagtaaagttattcgctgtgaaatactttaaggcagatagctccacgtagtcgcgtgatttccaggcctgtgccttccgatcgtccgagctatcaagttcagtaccagataggggaacctgtttgtagatacgcatgaaggcgatatcctcggtacctgaacggcgacaaagatattttcccgcgacatatgccggatgcatgccaatgttgaaatccttctgggtaaccggaactgatgcctcactcaacttttctaatatgcgccagcggctagtgggatagagagtagcgcattgtttatccgaagggttcgggcatgctgtagtgatcaattcgttgatcatcttgggaagaactggacgagcttcgatttcaggcatcgtgagcttggaaaagagagatggtgtcaagaggctaggagaagaaatggcgatgcggcagtattatactttcacttctggggaaaagaagaagagggtagtaaacattaacccgtggactagttggtcgccatacgtcatgtgatccaaacacccgacgaggtattgtgacaccattgtgcataattggatagttgtatgggagatagagaccgagattgaaactacctataagacacatcgtgaatgcattctgcgcattaatttcaaattcacattaattcgttcaaggttaacctttttttccgtattttcccgtatttttctcatgtctacctagaagataactatacaaaaaagcacattaaaagactaccatcaagccaactgggtcatatgacaggctgcaaaagtggccgactatccttgtgttcgtgaatcaaaaagcaggaaacctaaaaccatacagcatagggcagcaagaaagaggttaagtgtagttagggccattttgaatttacgtgaaaggtactatctgcggttcatctcaaaccaaaagaggacctccagctagataaaaactagctgcagaatgcccccacgatcatatcatgtagcggataagtcattcattatagtaggtagtagggtggctgaaggcgtatgttctgggattgggtgcttcaatgtcactaatcatggtgaccatcacgccggtgaatattgataacgaggttagtactagttgttatttagttttcctcggcagataaaacagttattgttgagactgataggacctgctccctaccttgtttggtcttccttctctctctcttagcgagcacacacaatacaacacattgttctctttctcatcagttatccgggtcgtgtagcagttgtagtatctcgtctaggtgacaggggtaacctaggagccactgtttgtttgtagaatcctagaggtataatacccaatggtcaatgatatggttaatgatatgagtgttaaaggtgcctatagctactgcctgatttcccttcaacttctctttccattccgccttgctcttcttctctgactcttttaatacgccgagctcttaagcctccccttccttccattgtttccctcattcagctatctgcgcatgacgaagctttttttgcactctagattgccataatctaccattttcactttcaattttcttctcatctcagatgtgagtcttactcaagagccatttgattagtatactaataagaatccccttttagtaccatctcaacatgaaatctcccacgattacaacgcaggaggcagtcgaaagttgtctccctgaccttctcaaggctactcacaaaaccttatcatccgcaatacacaaagtcaaatatattggcccgctatctcaatggcaggacttcgaggaagatgtcaagaataacaaccccaaacgttggacctcggctgttattgattatcgtatcagcaaccgcgatcttcggcaagaggaagtctatgttgccgacgagacaggtgttcaaggaaggttccaacaggctgtaggtcaagttctcggagctgtctttagggcggaaaagaagaatctccgctttggggactttaagtctgctggcattacctacgacaaaaccccggatattgctatggtgtctcccggatccccagtcatgcttcgagctgtcggcgagctcaaagtcccctgggtcatggctcacaacctgaggaaacggtacggcgccgatcaagaactgcgtttagcacttggacaagtgctcgaatatatgattgacctacgacttccttatggatttcattctacctatgaagaaaccatctttttgaggcacgtccaggttaacggacagtggagggtcgaatactcacccgtgattcagagcacggcgactgatgtttcactaaagaagtgtttttggcacctatcatcgctggcactccaagggaatcctgttcaaaaccccgctttgaaggatgacttggtcactgacgaaattctttgatttagtcctataagccaattctgcttaatcctctttcttccttgctcctttgtctctctatgcttggtatcttattgaaatgcactctttgggaactatgagctttctctcaggatattgttgaaagtaaagttgctaaagattgaccagtaattcaagtttcacctgattttcctatgtcgttgaccctgtcaggtgccaagggacctcacaagtcttggcttttggtcggcccgtgggatccgggccgagggtggacctcaaccctggaaagccctgcatgtgtgcatacgtggggcttcggcttccttgagtcggacttcttatcgcagggcaaaggaattaaagggggattatgaagattgcgacgttcacaccgcggataagctttggccgttgcagcacgttcggaggacaaggacaagactggctatgtatacgataacgagcctcaatgtccccgtagatacctccgttcaacgaatcatttggacaagggatttggttgaagaacatccgagggtttggccccacttcctgagctaaataaggaaaggcttgatgcttcgctcgcttcccaggctgaaacattttcaaatcccagattcccacgaaattcttgtctttaacacagcaccggccaataaatctggtcccttggctactcccggcagctgcagttaccccgaggacaatgaggttcaaaggtgccgggcatatggccatagtggcgttgcgcattctactgtttacaaatcaagtcttggcgctcaacctggatgttaacaatcagcgtaagataactatgttttcatatctttctaacggttgagttgctaattacatatattttcaatgagtagaatccatcaaagatgccgggagcaccgccgcctacaacatgatgacatggtacaaagaaaatgggacagataacccgggtttcatctcaagatcttggtggacaggagctgctttgtttctagcatgtctcaattattggcatgctacaaacgacacaacctacaacgatgaagtcagcatcggattacaacatcaggggggttctggcggagactacatgccttcatgggcagtaggcatagtaagtgtctctctcaagatatgtagtcaaagtgctaaccgttgcatagggaaatgatgatcaaatgttctggggcctcgcggcgatcaccgcagcagaatataaattcccgaatcgtccaagtggggacacctggctcacccttgcagagggcgttttcaatgaccagatatcgccagaagggaagggatgggagacgactatttgtggaggtggccttcgctggcagaaggagatatggcaaagtggttataccatgaagaacgcggtgtcgaacggtggctttttcatgctcgcggctcgtctcgcttggtatacccaaaagaacaactacgccacgtgggctgcgaaagtctacgactggtctacgacggtgaatttggtcaataataaaacctgggcagtggcagatagtgtcagagcaggctctgggggtcccaatggctgcagtcttcctgaccacaccgagtggacctacaactatggtacctatatatctggtgctggctatatgtatgcctacgtaagtatttttatcccccaccctttagtaaatcagaactacactcctgtcttggcatgctaataacaaacctcgttgtagacaaacgatactaaatggcttaatatcacaaacaacctagtggattcattgtttactacatttttcctacctcaacacggaggtgtgattacagactgggagtgcgaagcttcggacgaatgctacaaagatgcgaatggtccacttttcaaaggccttactgtgtcgtggcttgcagatgttgcattgatcgtccctttcctcagggagaagatcctacccaaactccaagtttctgcccagggtgctgcaaattcatgcaccggcaacaaccaaaacctctgtggtaaccgctggtacggcgggtatgatgggcaaaattcaatggagaatgcaatgagtggtagtcagataatgagtgctgttatgctgcaatttctaggcacatcctcaaaaccagtctcgacagcaacaggagggaacggcacaagcgacccgagtgctggtactggggaaaggtcggggcctgcaccgttgtcgcctatcacaacggcagatagagcaggagcaggaatcctgacagtgcttttcgtggctcttatgttaggcggagtggtctttttgtttatggacccctgatcctcctgggatgatattctagcaactaatcaagaagcgaagcttacgggccgacttatatttcaagttctcacaataaattttttctttccgtgatctattgacgccggacagttaagaaatatcgagataaatgatcacgggatcgagtagacggcagtgagaaacttatatttcccgagaaagtatctatattctacagtctactataaaatataccaactactacatactagatatttatgtatcagttcaactggttgaattcaagcccggaggctgacgaagattttggaaatattcacattcgccggtcggagcggatacaaaacttccccagacttcttctcctcctcgaatgttgtcgtgtgaaactgcgcgatgatagttcccctgaacggcgccggtggtttcgaccacaccttttccacaaccttggaaacactctcgatttggataccccggaacccttcagtcgccgagcgtctcatcatttcttccgccaacatcctcataagcccacggccggaataagattggacggtgttggtagcgttgcgcatcagtacctgtccgcgaccagtaggcctccacgatgcaggatcccgctggtctcgctcctcgagggcgtggtatagtgtttcgaacatgggcagtgttgctatcagaggctttatctgaaccatgtctagatcgtcgatgccatcgtaagccatagcaattgagactagtgggaagtccatctactctgcaaggtccctttccgttgcactttcatcatccagattccagtacagcttgccccccgtggctgcagacgcgggtcgcttgtattggtattctttgtcgaagataccaagtgacttccctgagtcaatctggtgttttattaaatagtacgaagtctaaaggtttgataggctcgctgggtgttgttctcgggatagacgaccggccacaacggggagtggaatatatttatatgaatgcaaattgcccgggcccattcctcatgttctggcccaagaaggcgaatttcgtactgcggcgccagagatagggtcattttgatcaaattaccaagctgagaatacgtgcatcagatgtgggaaagaggggctattaatacccgggtttctagctgcagtgtaaccattgtcatttcagtacagggagctagctaggtagctacgtgttacaggtatctgatgcgtgggatagtgccccaaattgcttcccgggtaccattgacttggcctgtgtttcctatgacacagcatggactcctcgcacgttattttgacgagttggattctctgtagaaaatatgggaatcggcttttgatgcaagggattactatcgctcgctacaagaagggaccagtcctaacctcatccaaattaggaatgtagaatgtatagcgacggaaaaataaacgcctataatgcactataccttgaaaacatcatggtccttcggtggcccatcaccacatccattaatatcacatatcccatatcccatatatatctccttcactcttcctcgttcacaagttcgccctgaactctccgttccggacgcggaccagcatttcatatctgcgtctcggtactcaacacccggttgaataaaacgcagagtagaatgcaccaatgttggacaaagcagtccactctctctaggagcaaggactagcaaaagccagaacaataaagcgtaaagaaaaagtgcagaaacggcccaccaactctccggctcaggagtcaacaccagtgtcgacaataagcacccgaagcacgttcattgtgcacacctcttcgaatggaaaaaaagaacaggaaacaacacaccaaacccctccaaaattatcatggcgcagccatatacccgttctcactctcgctttcactctcatttccccccaagtcactcaagtcccgactccgatggccagaatcagaccaccgcctcgcaccaggcaagacagcagatatactgcctgttgagtgcttttcacaagtataaccaaccaggacagtcttttcctgtacttcatgaccgcgctgtccataagcagagcatgggtcgatcgagtgctcgaagtagaggcatttgcaaacggagtaacgttcgacgactttgtaacacatttcgcgtatggtatattggatgggatttggggtgggttgaggttggatgatgactgtggttgttctgggttgtttttgagagccgaaagagaagaagaagcgaaccagccgattgaatgaatagaagaaaaatataacagaaaataaagcggacaagtatagaaagataggctggcggaagaatgacccgaaaggaaatccgagggagtgactgggttgaaagactgaggggggtatatagaggaactgggggttatatatttagcgagtatagacctgatatattcacacataatgcaataacatataaaataatataaaataacatacaaaaccatatcccgagggtcagccctatgggatgtagccccaggcagaaaccaacggggcgcgcccaatcggctaataaggaggaggaattgggaattgttactccactacgtagacaggtactggctatggacgcgggtctacctgtgtctgcataggtcgggtttagcaacgtatccattttacccctctatgctgtacatagcgggtgactatggaggatagtgggggtgcgatacacaataaaagaccagtccagtcctatcccctcagctggaatgttcacactctgactccgtaaatctcactatcgcgacacggaaatagtaaccgcagcagtcaaggatctacaagtgtggcagggaagcgaaagacggtggacacatagggaagataaccccgcgacggagtcggtgagccacaaggctgcgcagccgcataacagcgagcaaatagaattgacactggatgaggaatcagagatcgcgatatgactggctgcgtggcgtcgatcataaatccaatgtgcccaggtggacatccgggcgttttgagtcagagcctcttgacacagccaccccgtcacaggtctaggagtgtggcttaggtatagagccgccgttgaccgcatatcgatgactaggtctctatacgattagttacactctattctattacaaactgtcgcattcaaacggtgacattttgtagcgtgtagattaggcgcccgcattcagctgctgacgctaacacgaacacgaacagagttgacggagtacggagtaccgaggggaattcgcgagaaccggttttttttagctcgacgctaatcaccacggacacgttgcatgatatacctcgtgggttatccgtcagaggccgtagggctgagggcccgagcccccgagcccacttgccgttttgggtcggaggtccaggagattgtgttgttttacgtgatatcgtagattatatcgtagatacgctcatatagagaaggtactggctcaagaatcaagtcgcatggttctgatatcgtacagcgcctgtcataaagacaaagtccctgaagtagatgtgtgtgtgtgcaaatgtgctaagctaaattgatttcccggattaaaaaacacccattttcaaaactaggcctccctcttactctaactccgtaatttcagattgatcccattgcgccgtgactcaacccgcgtgctaatcccagccgaaggatctggaggatatccccacccttagcggtctcgggaagcccggcgcgccaatcccatccgcgatcggcgctggctttgtcacctggcgtaggcactaggacgccggagctgcccacggagggagggtgggatcctgagcccgagcgtgcccgcgctgactcgagcatgtcgttgccaatgaaggcaaagctggaggcggagaaattggacacggacttcttcaatagcgcgcgcggggaggggggtccatctaatcctccgcgcattgacgattggtattcgagtagggtggaccggaaacattcctcgcactgtgcgtagacacggggggtgacggtttccaggtcctcgattgcggacaggatggtgaactgttgggatacggacaggattgcggtgggttctggcgccagattagtatcggggaagaaggttgacggggttaacttggaagacttacggttcacaaatgcacaggcttcacccagcagagccagcagtccatccacctgcacggcggagtcacggtccgggtcgtagagacctccgtaaatattatccgccgcactcctaatgacagccgcaagagcttgtgcagcggcgcgtcgccgagccaaaggcttgtagcgtggtcgctggccctcttgcagttcgaattcctcatcgcggatctcatagaaccggcgcaacgtcgcgtaaccactgaggtagaactggagaatccgagcagcttcttcatcgatttgtgcaatggatgacaggcacgctttgggttccttcatcaaagagcgcagttgttcatcgagatcggccgtcgcagggtacgcgcgtgattgaaccagactataggaaatcaataggtcgacaaccgatttgaccttgcgtcggctctgggcacgagcatagcagacgagggctagaccgaaattttcagattttgaggtcaacatgtcgccgaatcgctgtcaataagttagcagttggtcagtcaaaaggagttcccttctatcactcacctcagatacccgacgcccttgatcctccagctcaagttccgagcagagaaccactagtttatctaactgctcagggctttccaaaggaagcttatccacgatctcggtcacggcctgcttcatctggtttgcatcgtccatgcggctcaatacctcaatagccagctcccagccttcacgggaactgtgctcatcctcaataacggttcggtcatacagtccgaatgcgtaactgcgaagaatatcgtccttgcgcaaatggcgggccggagacttgttatcctgcccgtacgaaagaaccataagatcattttcagacagcccaggaatcgtcttttggctgcttgcggactcaaaccaacctcctaggctggcaacttcggccacagctgcggccacgcaaagtgaccatgactgtaccaactctaacacgccctgcacatttccttcgaagacagatgcgagaccgacttccacgctgctgagcggattgggtcggaaatcagcggtgtcggacccatcactggtggtgtgactgagggctagttcgaggcggtcgagataggcgccacgcatgttgcgatcaacagcgcgaacgtggttctttgggccacgcgagcgcaggaaatcttggaagttgtcgctagcgccaaaatccatgttggaaccggtgtcatcctcgccatcccaccatgctgtcaacgcaatagtcgcctccacccagtcttgagacttggccttgatggcagatgggtcgcccagaataattcggtagatagatctcaagctctggtaaattgaccatgggacacggctctctgccatgcgagccgattgagcaaatgagattgggttcttattagcagtatttgagttgaaagtggacaagccaaagttaacagcctggaagcgattctctggaaccggcataatcgattcatctcgctcctctccctcagcgaattcctccagatcagtgacagccgaaagaactcgtttccggtactgagaccaatcaagaccggtgacttcccagtcttcagcttgggttccaggacatgattcaagaatttgaagagctttgttaacgcaacgctggatgttttgcagctgtgcgccacggtagccaggctgtggaagtccatcctccattgctgaccgggcgtagttgaagtctgcggaacggagaacacctgcggcatcagtcaagcgactacgcagcacggaagcaatgataatatcccagaagttcgaggatgcggtcgggttcggttccacatatttcaatgcttggagctccttggtctgcgatacgtggttgtcactgagccagtcaagcaaaacctgtggtagaggcttagggacggggagtctcgtcatggctttcaccatgccaggggccccggtgcgcatgggattgatgtgggcagtcgacgctgcttcacgagaagggtggtggatttggagcagcaacgaagccaagaaggtagcttttgcaaggtcggaagcctggtccccgggcccaataccagaatgggcaccgtatggccggtcaatcccactttcgttcgcgcaagtctgccaattatctgtcaactcctttgatatcttcgccaatacagcatcgaaatcgacatgcttgaattccgcggctttgagctcgtcggaaagttttcccagggcgtcctccgttttgagaatcatctcacttggctctttaacaaaggcaatgcgggatctggtagcaatattgtgaagaattgatggcatcgcggacggcttcttgggggccaggttggtcttgcggaggggagactggtgcgcccagtgctcgtcaagcttcggtcgcttggcatcgtttggattcgaatagatctgtttgcgctgcgcacccatggagggctgagacccgaaagggtttccgaaggccgagtctaagaagttgaagtttttggactgatcctgggtgttcatgttcatttcctcttcaattgcctcctctgcctctggttccatcccgtcttcctgctcttcatggaagtcactcatttgcgacgatgcaaacccattggaatgtccgaaatccagcgaatccccaaatccgccgttcggcacaccgaaacgaagactggagttacccttgaacctagcggaaggggctttggtctgcttgggcatggcataatccgtcgatccaaatgatgatccgaagatgctgtcatttgtattgatgttaccggatttggtaaagaccgagttggagaagtcatttctcgagaaggagttctggtttgtggagaatgcgccatcgtttcgggagaaggagttgatgcgcgagccaccgttgatgttggatgtagaatgaggtatgaatgagcctgcggtcgatggtggcgggccagcaggagttgtcgacaaattgctccaaagactgcgagagctatctttctctggagtctcaggtggactggactcgtagggtacttggaatgacatcgcggggtcgggttgatcagaatgagaagagacgggtcgacggcatcagaggatgcaagttttgggtcacaacagctctaagaactgttagatggaacaaacgacgataacaatcgacaaaaattgattctggaggcaatgaagaaggtcggcgcagttgattgtttgtcagaggagttccctcttctcgggacttgcttgtttttttttctcgcccttcactttctgcttcgacgcgacggcggaagttatgaggcatcaaggcatctatatttagatcaggtgattttactcgaagttaggtcacgtgaggtgcttactcagaccaaagcatgccatcacgtggctgtcggtcaccaacttggggcgataacatgattggcttattgctgagctctgattaggcagggatcagcaagtcaggtacgaagccacatctgatgcatctgattttgccccgggggttcgacgagcgacacttcatgaactcaagcttgcaaagatggatcccaatcatgcttagttcgaacaagaccaagcctttaattgatcagagaatctaggtgtataattaacacgctaaactcaggttcttggaaactagtcacatttccacggagtactccgtacggtaacactctcgactttcaagtgtctcaactttcaagtgtctcaactttcgagtgtctcaactttgaagtgtctcaggcgtctccggttcatcaaatccacatttatcgtgtgtccagccgccgagtatctcagtacccacagcttctagcgccacaactacaatctcagacaaactaaacaccttcatggcgctaactgctccttcacacttggaaagccggatattactttccaccgtaccccgactccagagggcccgtcgtgggaatgtggaagttccgacccttctccttaaactgtacgatccgtcttgggaccccgaacgatccaacaaatggatcgagaatacctgcacaaacaaggcttttcggagtatatattgatcccgcatgcagttcgacgacgggaggaagctgatttttgcctggcaaccaacactcgcttggcagcgaatatgaaaactagtcgagtagaccagactatagtgacggcttttgttctagcggcatctcttccaaaacaagcagcaatttgactatctatgcaaactaaggctgcggttctacctcatggcgctcatctcgggaattagcttttttgagaaggtcagctgtgcgaaacagagctcggcgggggtggggcgggcgttgcaggtgcggagaatcaggttgttcggacaagtttgaggtttaattgacggccccgtggcgttctggatattacataattacggatttacgaaaatcccggacggttcattttagtgttatttacctattatacccttgagcaactgctatattctctcacatttgtttaatttgttttcacgatagattgtactttgtacaaagtaggccaaatcaaatgttccaaatgcccgaagccaagcgaggcagtgcaagctgagacaatgtttcagattagacaagcctttttcgatggtttgatcgacagggttcggttactaagggatatcccgaggttcctcccgatgatatcgaatcctgttgcctacccccgaagaaaccaaccctaaaaacaacccgagagacctagagcctcatttttttctttctctcaagctatggccaatccaaaaattgcatgactatggcgttccgacgaccacatcggaaatctcgccacggctgcatggaatgcaagagacgccgagtcaaggtgagaaagaaaagagaagggcaaaaaatagtatactcatcccatcacagtgcgacgaaacccggccaatatgcaccaactgcaccaagcgtcattctgaatgtgagtacgggtcgtcaacctccctactgtgggcaaatgaagaccccacggcaccatctctcgggtccgacagcggacagtctggcgacccagtacggggactccgttcatcgttgagtccaagtgcaggagcgggaacagcagactccttcggagtcctaggccagcacggcagtgaaaatgccgcgatctcagcgggatccccactgaacctcaacgacctggagctgatgatgcagtggtgcaacacgacattccggacactgtcacgcaacgagcacaccgacccaatctggcgctacatcgtacccgaagaggcgctcttacatccattcctaatgcatggcatcctggccctgtcatcgctacatctcgctcgaacagggccggagctgacccgtcgcgcgtcatatctcaaccgtgctgtcgcgcaccagaaccaggcgctggcgctgtttcgggagctactgggcgacgtgaaggagagtaatgccaaggcgatgtttgcttttgcgggaattgtggttatctacacgtttgcattcccgcatacaccagacgtgcaggatccgtggtcctgcgtcgatgatttgtaccaggttctcgttttggcgcgcggcgtgcagcaggttatttatgcgccccgggactttaccagttttctagaggacagttccttcggtccgattttacaggccgaggagactcagggttcgatccccgaggacacgactgctatgctcaaacaactgcgtgaggctaatgaagtctgcggggcgcgggataaaaatcatgacgtgcaggtttataaagggtccattgcgaatctggaggaaatgcttagttggtgctacagcgggatgagggcaagtacgattgctgggaggtgggtgatccgcttgcatcctcggttcatggagttgctacgcgaacgagaccccttcgcgctagttatgctagcgcactatggcgtgcttttacaatatttgaagcatcgttggtgctttgacgagtggtgtgtcagggtctccaaggccgtgtgggcaatattggacgatcagtggaggccgctgatccagtgggcaatgaaagagattcttggtgttaactttccgcaacaggttggcacttgacattttgaagcatttttttgttactttcatattcatattcgtatacccaagttcaaagcgccgaaaccgcgagagaaatcccaccaatccaaaagaaaaacaatttggatctccacctgaatatctccacaattatcgcaacaaatcccgattctaacccattaaacgatgcttgagccttccatggccttcaacccacttataactatcacaactcttttcatcccacgaagatgattcacctcgctagggtgaatgatcacgaaaatgacgcaagcatcaacaattcatcaatgacataaattaaaggggaaatttttatgataaaaccatgcgtgcccagagcatattctacgacatgaatgacgaatcgcatgagagaacgatactggacgagtggatgaagcttacgccggtgaccattcttcccgcacctttgggagtgagcattgagaaagtcaattgatctgaaccaatcatgaaggagagacatgaggggaataagcataccagaagcctacctcgccgcgataaatatatccagctaacccaaattagggcaagctgctccccttggccataaaaataatccgggcctattccatgtagatactagctgaacagggtggcaataggcagcgatgtgatctgcgtaatatagcatggtacctacagtatccgccgactaacgggatcaagaattgtgttctcgtgcggaacaaatgaaatgtgtgcattagagcgataattgcaaagcggactaggagggatgctaatcctgaatttctccttagatctgcaacgagcaccaagcagtccttggaaacgcaaattcgtgttaggaaaggcgaattcgtatactccgtactccggtatccacttcggataagagttaagctttgtggcgttccgtatcaggactagcgggtatccactcgtctcatatgtatcgggacagcaatccgaagccctagagggatacctagcctgcagatctcgtgtgggtacggagtaaaatgtctcaattctttcatctaggaccataacctacaacttcgcctgctcactcttattttgcagcacataccgatatctcgcctttccctcatgcatatcaactagcgcctgattaacatccaccatatccctcttctgaatccaaggtaaaacccttttcttcgcagccagagtcagcatagcccgaatatcatcaggagaaccaatattggacccagtaaccttgacactcttctggataagactccaagccataagcggcggcaacgcatcctccggcgccccaatctgcacaaaagtcccatcccgcttaagcagtctcaaatactgcgcgaagggcatatcatgcgccgacaccgtacacaagataagatcaagcgagcgcgaatatttcttcgcccaccccttctcctcacccgtagcaataaacccatcagccccaaggccaccaacagcatccgccttcttccccgacgatcgcgaaatagcaacaacacgatccgccccaagcgccctagcaaacaaaatccccagatgtcccagccccccaaccccaacaatccccaccgtcttcccaggcccaaccccatacttcctcatcggcgcgaacacagtaacacccgcacacagcaacggcgccgcctcggccgagggcagagaatccggaatccggaatacgaaatgcgcaggcccgcgccacctctctgcaaacccgccatacgacttcgacttgtcgctgtagcgtccgttgtacgtgcctgtcatgcgggcgcagtagctttcttccccgtcagcgcaggcatcgcagtctgcgcgtagacaggcgccgctctgtgcgccgacgccgacgcggtcgcccagacggatcgcgttcgggcccgattgggatgagacggcgctgccgaggcgtgtgactgtgccgattatctcgtggccgacgacgcaggggtagtcagttggaccccagcctgagcgtagagtgtggacgtcgctgccgcagatgccgcagtgggatatagaaatttcgacgtcggtgggtgtgaagggcttgggggtgtaggttgtgtatgttagggggcttttggcgtcatgggcgacccagcctttgaaggtgtcttgatctgtaggaggggacattgtttggtggtagttgcgttgtggagaggtgtcgaggtaggtgttgtgctgaattttgatacgtttgatgtatgcgaaattagagttccagaatttatgaggttgaaggaaacaagctgatgcggagaagccgaagaaaaagttaccgaggtccatcttaactccgaagtagagatacattattaaattcatatcgattgtagcgattatgcgaaagttactccatatttacatgcactcgctcaaaatgtgtacaatgcagactagtgggggtatcaattgatctttcagcgagccacgcccatcagatcttcaagctcatcagtagtgagagtactccgacgccggttcgctggcctggaagccttttcaggtcggcttctctttcgtgattcgcgctccttttgctcatttttagctgcgcgggcctcgtcttcgacggcagccagtttttggtgcacgcttggtggttcgttggctttgggctgtagggcgaatcagtgctcggggtctcattgggaatcttatgggaatatcctgggaaatagttctcgttgcatacctgctggggttcctttgtctcgatctttcgcctggttggcctgcgggtcacagtatcggctttgtaagctttgatgttgagggtatcgtcgtcggtattatccacacatggtgagccgtgtaaacctggcgtgaatgagacctttcggggacgctttgtcatggtattttcactgcgttccctcagaacgcgatcgggtcgctcgggtgctttgcgaatcttagatcccatcttcagaggattgagcctctcaggctctggtgctttctcctccgcttcgctcatatcttcctcctcagcttggtcctccaggattgtcgggataggattggactctgccaagctttgcatgctcatgtcctcggttgagttaatgctgagatcgagattcatgccgcgcttcaattcgtccgcttggacagaatctcctccatctgcaagacgtcgctgccacccacccatcatggtaactgcctgcttccaccgggattccatcttcacccagccttcccgcagtcgtttaatttcctcgtctctcacctcgacctcctcaagaggcacgaatgaggggttggtaagcagcgtttgtagatgctctagcactgcttccatgtgaccggatagttcttcacacgaggttggaagcgaagtaaccggtcctgaagaagacttctgcgctcctccgctcatcgccatacccaattgctcattctcgccattgccattgtcagtctccgtcaagccctgtagatccttcaaagtatgaacagtgttccgcgcaagctcaatcagggtatcgttctcatcactgaggtgttgacataactcggtcaagaagtcggtggtctcttgcttcaagctatatccagggtcatgtactcgttctccgccactagccagaagacgcgatcgatctgaggcagggttgatattgatcgtagtcacactcagaccctcacgcttgcctctttgtctctcagccagatgcgacttaagcttctgcatttccagatctcgcttgcgaatatcgtttgcgcattgcgctcgaacttgttggacggtactcttcatgcgctggacttgttccttgaaacttcggatgttcgcttcggcccgggacatgttggacttgagcgtgcgctcctgtgcctctgccagagctagcgagcgggtcaactcggatgtcttcgtttttagttttccctgtaggagcagcaaaggttagcgcgctatgctacagaagtagagtggagacatacgatctccgtggtctgctccgcctcgctggcttgcaacgtgcgaatagtcgcagataagctctcgcggtgttcggactcgcgctagtatttgtcagtcgcggatgaaggcgcagctcagtgcaatacacgcacgtctcgtctcaacactaaatcgttgaccaaattgatcacacgagccatggtgccgtctatccctccatcttcgtgttctgggtcagcaaaatcgatggcacgaccacctttcagcaagccccttgctagcaggatgttgttgacataggtcgaagctgcctgcaggttatgcgactccatggcagcgatcacttctattgtcgatgcagataactccgaatgccgaatggggaagaaagtaaacacgtaaatacgggaggctgtttgtgccaagtgtgcagctacttatgcggtgaggaaggaggtgtgattctgccagttcatcgtggaattgtatcgcgacgcgtcaagacttccaatttcattggatatttcctcaagtattccgataaagaggtaatccaattggacataaccatttatcgaaagtctgaagaggcagccctcaatccaggagcaattgaatgatatgctaatggtagtatcgtgccatctttattacatgacgcgtgggtataggccattgtccaatctccatgtcctatttgtcccttgcgtggcattaaactcgctcctaccccactacttaatcctcaccaaccgcctttgcatctgctcttcaacatggcttcaaggtcaggtacgcgtatggtacgcggagtaatatcaaaaaagaagcctgacatagagcaagccgctgctcttcaacgtgccggccaaaatgcatacaaagttggtgatctccaaggcgccattgagtccttcacccaggtatgccctaccttgtttgttccgtcgcgactcctactaatttatcatccatacatctaggcatgggtggcaaataacgaggatactagtatcctggataatcgtgccgccacctattgcaagctaaagcagtacagccaagcccgcgctgatgcgagagcaatggtcaagcttgcaccgaatgacgaccgtgtatctatccaccacagcgcttatttatcaactgtggattcatggctgactttgggaaaagggatacctgcgattggccaagatactatgcctagatgggaactttgacaaggcccgtgacatctacgaatatgccctccagaaacttccaaccgatcaccctggccgcaaggtatgcttttctttcttcactttttgttctactcagccctggaggtttactcctttagttatatctcattgacatcttcccccaccgtatcatgtcccactctttctttaccgttattaaccatctccaggccatcgagcagttacttagaagactgcaggataagctggcaggagggaaccggcgcgacccatttatggtcctgccactagaaatcgcagaactcacacttcagcgcttgcctttcaaacagattgtgtaagtgtacatccttacctctgaaatccactagctcattacggcatatagggcaatgctacgtgtctgcaaaggatggaaccgttttctgagcggtctagccagcttatggatgcatcttgacctcactggagctagacttcgtgtaccttggacatccgtccgaaactacatccatcgatcgcgcgcgcaactgactaatgccacgatcacaaatatcccaccctctactatgactaaggtgcttgatatgctaagcagatgcccccaattagagcacttggaggtggcggttccccatgaccagcctaaacagttttactcgaaaatccaagattttcgacatctcaagagtatcgtctgtggggcagacatcaggctttcgcatgcaagtgttgggggcattctatctaccctctcgaaacttgagagagctgcttttttgcatgtttgggatcattctaacagaggaccccagacatggccccagcatcttccaaatatgaaaagtctgactattgcatcttcacaagaaaataatcaatttttgagcttccgggatgtacttccggggttgggattggtaggcattctctgaatttaatatctgggacttccgctgacataaatcagtctgtgtatcccaatctagaggaattgcggctggtctgggatcccgcgcgatcacaatcataccggtttgatccggtgaaggaggaagaacaacttcccccgctccgcatacttgatcttcggggcgcggcggtccaacataatttctattcaatccttccaaccagccttgagactctacggttgttttcagggtccatcgaggcttctcatcttggtgggaatctgttgacaccgggagagaatgaactcccgaatctaaagaccttggtattcaatgataccccatgggtcaaccgctccaccctttccttattcctactccattcgaaggctcccctccgaactcttcacgtcaacctttgccacaacatcaaaagcgaagaactccttaatgtgctcaacgattccaacggagcgaatccagaattgaaagaattgactgacgtcggagttgcctgcatggcgggcatggacgataccagtgtcaaaagtctgtgggtaacattgccaaacctgaaaatcctcgacttgtcgcagacgagaattaccggctgtaccattcgcatgtttgcggatacctggactgaaggaccagccaccgcaaagctcgaaggcttaattataaaaggatgtgacgatgtgtctcgggatgcaattgactatggacggcaaatgggactcaagattgtcacttaggggcttggcagcgctctaaggatacttatcttagggcttttggtagacaattgtctaatgcactacccttgtaaaatgatcagaaataaccaaagatacctgcgcttgtatgaaaatgatgaatgatatgaatataaacttgctctcagaacttggaggtggagatagtgtcgagaggctaggggatcagagggcaaatgcatgggaaaataagaagagagaaacaagctggcagtcctggaaaacacatcatgtgatagcagcatacggtggcatatgtatgtacgcatgctaggtcttcaaacaaatcaaagagtgcatcaattcaaactaactaagacggagagaaagaagaagcaagtgcagaagtgggagagtgcctgcctatataactggcacttctgcaaacgtcgcaaacaacaaacgttttgaaagaataaaggaaacagcaaacgtgaggcaagcaagtaaaaaaataagcatgtgatgctatagaggatcgtaacacgcataatggccgggtaataataccaagggtacctgaaatccagaactaagaaaaccatctaaaccccacgttcctgacaccaccgctcaacctctttggccaacttctccttttgatcacgcacaagctccatcatgggctcaacctgcttcctgtgcgaggcaacaagatcctcactaccattgagagtaactacaccatccttcggcgcaagattctcgtcatagattttgaccataagctccataacagctgaaagctggtttggaagccactaaaaccccaaagcaatcagcatgatgatactcataagtcagagaaatcggacttgactcacggttacaataggactaccaccagtagcggtaggatgcggtgtgcgacgaataatatactcacgcgcgaacaaccagtgtcgccagcggaaactgcggatgtggttgagtgtgcgcaggaagaggactgcggtctcggagtcttgaatggcgtagttttggacgccgatttcttcggacttttcgcggatgtaggttaggaattcgcggtgtgggagagggcgataggcgcggaattcgtggaggattttggtgaggggtgtttcgggcatgggaatttcgcagagatgatctaggagggggatctggggttgtattagttgggttattcttttttccctctcttgggttccattggattgcttacgatgctatcatttgcaccgctctcaccgcggaagtagaggggcttgttgccttcacatccttcgtagatcacgccattcgggaacatggattggttggtgatgccgaagatgaagacgcggaaggagaggtattctgatggcttggaattgccccacatgtctatttcgatgtcagtttggaagatctggggatgtgtttcgtatggttagggttgcataccttccatggacgcttcgattttctccatcgactttaggatctcgcggaatccgtcgttgatatcctgtcgggagccatgctgctcaagattatccacaatctttaagacaccggcaatcagtgggccagtctccttgaccatgtcgacatgagtcaggatgaagcctgcttcggagctcttgggatcgagacccctctcgaaagaccgaatcagacgaaggttcgagtactcgctcagacccttggcagggtcggcaaaggtatagttgaatagagcatatgaagcagcatatgacatgaaaggtggcaggttcaggctatggataattgttagttccagtgttgtatgacgaagatatatcaaaataatccacgagatagggcagtaagaaaagaaagataagaagaaagaagacttacatctcagcacagcgatacataggacgggcaatagactggggcaatacatcgcgaccaagtccatagccacctgctgggtctttgttccagtgctcccagcaaggttcgagcaggtaagacgaagccaggaaggtatagtcacggaagaccgcagcaatagtgaagcgatcaggcgaaccatcagcgacaacgagcttctcgacctcgtcagtcaaatcagtaagctcagccttgacagcagggccgagctcataggtagccaacaggccgggcttgccatcgagcctaacgacagggaggcgattgactagagacagcagggcaccgaaggcctctggcagctcaacaggggcagtctcatagggcaagaagcctgtcttggtggtgatggtgaaggggtccagggagtgggagatggacgaagggtcatcatggatgtgagggaaccgcctcagggtagttggggaagggtagggcacttgggttcgagtcatgatgatatgagatgaaccagagaaaggagaagactagaaggctatgatatatgggtgtagtaacaaagggtgttttggggtagtatagggaagggtgtagatatataagccaaaggacaaaggagaaggcccaaagaccaagtcaagagcctaggtagtgggtgaaatgggtaaaaaaagtcggggaagaagctagaagacctcgagagatgaaaagagaattggaactttgagattttgggcgggcgaggagcagattcttataatactttgaggccggtaacaattccggcctcaagccctcattacgaaagagaatagaagatagcgtggacctggtgacatcaggtgcaacatgatgaaaattggttctatctatcctaaataacactcgagacagttcatatgagtatttttagccagaataagatattttcacatccatctcgacatccagatgaactatacaattacccagttagagagggcagaggacggtcacggggtggcgctagtcccgatacagcaggggctctaacagccggtttgactgctttacctgggatttaacggagatttgtgatgggaaattccaaataaggtgtttaaaaagtctataaaaaagatattggccattcactgatgaattactacagatgaatggccaatgttgtctacttaagtcgtgatgtatactctatagtccatggactgccaagcggagatccccatatcccgctctctgattggacgataagcccagatttaacttccctagcgttcggaggccggaatactaccggcctccgagagtagccggcctcgttatatgtgccgggttgatttgatataggacaggctcataaattagtatgataccttgtggtgattcccgagataaagcgaagattgacttataaacagctccatctctctaaaaatcttattatcttgttatttgaggaagaagtcgcacttagtatatctctaaatatattagaaacaaacaaaagaacctatcgtacatttgcatcccaaaagtaccgaaagtacttgatctattcagtgactctctagtattatatatttattgtataccacgcgattagatatgaatgatctccgttgttgataatctcacgatccgtcgttcccttctataatcttcatacaaatgcacgctcagtcctattcaccaccaaagtccaagaattgtgatagaaagtcccatgcaactgcggcaaaaaatactgcaagaccgcatcccctacaccagctggcagcgacctcttgtcaccccaatagtgcctcaccaactccccgacacatcccgtagctgcgacccctgggcacccatttgcctctgcacaagataggactcgaatgtcctccgatctgttaaattcatacctgacgtggttcccaaatgcagattgctcatgtggccattctcggccccatttagcgcagtctggatagcgcgtttcagtgggacaatcgtcccacgcctcaaagagttcatgggtgcgagggctttgctgggcaataataaatccagtgttgagaaatgtccggccgttccaatcaaggttgtgaggtgcttctggatcgagcgccatggcaaccagagtctccggagtgatctcccagtagttgaatagccattccatgggtagattggggtacggcatcatggcgtctgaatccatgaatacaacgtattcgtagtgttccaacgcttctttgatggcggtgactttgatccatgttccacttcgcccgactgctctggggatctgaactagtcggtaatcgtagccatggatcattgctatgctagtcaatcacaccgtaggaacagatagaagtgtgactacttaccgaacatgtaatggttgagtcttccactgacatccggaggaagtccagtcgcgttcaatggaaccttgctcaaaagaccttgagggccatcaagatcccgactatcggcgtccaaaatgaggatcttctttcctaatggttcggtgaaccttaatggctccgcaacccagaaggctttccctgtgcggccaataaatatggttctagtaatggggtgtatgtagggattgtatagtttgcggaccgtggaggagtataagtggctttcgacggtccataggaagtgcttcctatactagagtcagtcctcaacttcaacattttgctttgcgtgggctcgtactgggacggctgatcgattaatacactgttcaagtaggagtataccaaaagcagcgcacacacgatcagactcgaagtaaaaatagcggttattcggcgaggaaacatgagtcctgaccttggacgaggcatggggatggtacatttccggagtttccgatctgtagatttgacatagtatggatggaagtcgattgaaatgacataatttcgatgaagtaggacttatctcacccaattcatccatttgagtcctcacctcttgccgctttttgcttggagggactaagcacgcctttttctgatctggtccttattttcgtactatgccattgaacaaaaagttctccgaatatatttccagggttccgacgctgctttttctgaattctaatttttttgaccaaatttgccgtctctttagttcgcagttccatttaaacggtagaaatcgatgaaagtacagcgcagctcctaatcccttagttgtccaagcgaaggtcccatttgaatcagacataatgtctccataccccttcgtgataccgtatggtccgtatcggaaccttggaaaccgggccgaaattgcggggggtcaagtggtatatcatattcctaaggctttccgtcttttttttctcagtttcctcatgtccgcagaatcatccaaatgttgcgtcgcatgtggttggacgctcgagcagcaagaaaattgcgcttattcgagccaccttaaactcttttatggcgccggcaagcggggaacatggtcgattgggtctgatgttattttgaaagaacgccccgatgaaggtccaaaaaccgaagtgaccaccttgaagcaccttgcagcctaccccgatatcccggttccaaagatattgcgtgactgggtcgacggcaacgggcagtactttgtacttctagagcggatccaaggtcaaacgctcgaacaggcctggtcttcgttatcagatacccagaaaatagccatcgcagatgaatgtattggaattcgaaagcagttacgattagtcagcacctatagaaaatgttgatcaaactccttgttttccgggcctactgttttttgacagtgagccgcatggacctttccactctgacatcgagctttgggatgccccaagtcttactctacacgatccacctacaaggtcgttccctcaacgagccctagcaaatctgaaggaacggctgcccaaatgtgaaccctacgtcctcacccattgtgatctcaatttgggcaatattatggtgaaagacggaaggctggctgggatactcgattgggaatttgctgcatattacccaatttggtatgagtacgtttcagcctcttgggggtggacagaggaggatgcccagtggaaaaagcttttacgagagcgtatggctgtacatggcgatgaacatgaggatgcgaaggaattctggacggatttgcatcatttgagaaaatacccagatttggacgaaaaaaggccaagaagttttagaaaggttgtctgcggattaacgacaatgtataggaaaacgaaggtccggggggattaagccggcaagagaatttactaaaatcgatctagatttcaaaccatcctatccaatgagacgacctttcaaacaagctcatacaagtatacctcccacatcccatgaggatcttcaaaaaaagttatgtcatcccgatcaagccattaagatcctggagcagctgttgtaccagctccatattatctgatttctcacgcaatgccttcttgagtgcaccggctgcctccttggtatttccaggcactacctcctcagactgcagtttcttctctgcagacttgatactttccttcgcacttcgaatctgagaccaatacactgaggtcttgttgagatatccagtctcctcaagaggcaagttccacttttcaggagtcatttcgacaatatccaaccatttggccatgtgcggccatcggcgctcctccagacccgggaagtgcacgagcagatcccctcttttgccttcataggcccagtcccattcataggtattgatccacggtcgtggcagataggagactccatctgcgtaaccctgtccacttggaccccccgtcgttttgttgagcacacgtctcatgctttcttggtcagcagatcgaccaaggtcaatctgagggagataaagagggtagcccaatgtttcggtaaggaaactgatcatccagggatggacgtggaggaacataatccccgtgttgaggccgttttggtcctggcttgccactaggtggatatctttcaggtcggacggcgggaggaagatttccacggggatgtcattgttcagtataatcgagtctgcgtctacccacctgcgcgaattagcattctcaagcatatacaaagaaagaaaggacatacatcaaccactccattctctcgccggctggcttggtcaattcattgacaaccaaggatagcagatagctcggtttgttccaaaatccgatcgagatatcctgccgcaggatatgcatggggtatccccattgcttcccatggcgttcatggctttgtagcgctctttcgtacatatggttcgtctctccgtatagcatggacactttggcgaccctttgcaacttgttactgggagcattttccgactcgagaatagaaaaggaattgactgaattggctgtgacccaaacaacacatgttactgatagaattatcaggacgatgtgcaagggtcgttgtttgaatgccagttggtgtggaatcatagccgtcatcaccgcgtaggtgctaggcttgttcctcattgtgggtgtgggtgggaagatgaaaaataaatgcttccttgaggttcagccgggaccattgccagattcggaattgaatgcttgattggaggctcgtgagttgtatgaattcgtacttccggattgggaattccgttttcggtaactcaggtacaccccgtctataccgacgaataatgtccaattaatttagtttataaatagatatcgatccaatcatttgaagacaaagctcgcttattctaggacgcatggaaatgcgctgtgttgcgtacggatacttacggtccactgcccacatggtgcgtatgaagcccacaaaggtgtgccggtgtatattgatgataagaagcgatgtcgccgatctcatgagaacattcctgcgactgaccgcagcacctgatagattacataagaacatttaagcgtctaactaactagttagactacatggcaccggagtattgtagaccataatcacaacagaacgttcgattattgtcgctacagcggtgtatatattacaggccttaaggtccgttcgagattataagagaaccaagatcgcttggaaactacagcattaactacaagataccgtccagacgacgcccaaactggtagagagacgatttcatgttatatgatacagatgagggtatattatacaccacattttcaaatatttgtacaacagcgcatattcatacaactttaactccacgttcccatgcatcagcgacctggccgtcattggattcattgtatagcccgagcgcatccagtccgaatcgcagactagatcccgcaaacgaacgcagcacaatatacacagtcatatctacactatgaccctggactcgtgttctgactagttgtttttgagtcgccggtggtgctgtgtaccgtctggagcttgagatactcctgttcgagggccttttgcatttcaaagtcggcctggcgttctagtcggacacgctgcttttccatatcacgttcgactcctctgtgcatagcctagcatccaacaacgtaagtatataccagaaacagggaagagaagctgtaacataccgctctatccgcctcttgtgcccagtggacaaaccagacaatacccattgtgccgaggccagtggctgccaatgtaaactttgatgcgcgagacattgcaggatatgtgagagcacggctcgacgcagagattcggctggtaatggtcacaaacaatgttttggcctgtcagatgttcatcaaaacgattccgggattatcagatcaccgggcggcgtttggtggcagaacccccaccgctctggggggcgatgcgtggctccgatcgacctaggctcggagctacagactcgccgtttaatcgtccctgtcctgccttatttcccttctaccctatttccaaagctgagaggtttctagcaaatatggtgagcaatctgtctcagaattggtggccagctgctaacggtgaacaacagtcggctcagaactccgcgggcattcagaccctcctcgatgtaggtcttcgttgtatgttgagcgcatcgtggagatactaaccatgggactgctaggccgagagagaggcccagaagattgtgcagaaaggtaagtgtcttacccctcatcgctgcctatcacaaacactaatacgtcacgttacatttagccagagagtgtacgcaatacaaacttacctgtcgtcattcgcaccatcgaactaatgatttcgcaactctacagaccgtacccagcgtataagggatgccaagtcagaggcccagaaggagatcgaagaatacaagaagcagaaggaagaggagtacaagaagttcgagaccgaggtgagatacaattcctaaatggcggtcataacaagaggcatccacagtgctaatttgactggtctcactagcactcaagcggatacaaggtagccgaggccgaggccgacaaggaaggcgaggtcaagctccaggagatcaaggaagccggcaagaagcacggcgagaaagtggtcgcaaatctcattcgtgtgacgaccgacgtcaagcccgaggtgcctgagaatatcaaggcataatgtagatactctcggttatcttttctttcgtcgcgtgaatgcgcttgcgtgtctgttcatcgatatccaattgtcggacaatatcaatttctttttggcttaaccctgtgtatgatgtggatggattctggatcgctcgttttggaatacgcatgtcgtattcctatcccatggtgtccctgaaattttggcttgactctaggcttttcggttgacagcacgtctaggtttcaccacaacacagagagctatgcctaggcaaacagctcaccagtatactaagccatacaacacaccttgatattcgtatctgtattacgggacggcaacaagaggcgcagggtgactcaatgcgctgtccaaacgtctggacaggtatcagcactcatccctgttgaatggatccttgagcgacgagttactgctggtaacacattctggcactagtggcactgttggttttaaggagtgtctgtcccaatatcagaatagtgtataattagcgtttgagatttgtctcttaggccttgaaatgtttgattatattctgaattattccggcgcgaaaagaggcctatcctaatgaatcaagccctgaatttctagctgataacacatatctttctctttacataggtacatatataggctacgctcttggtggaagaacacactggtgaatagtattaaacagtgggaaatggcgggtgggaagccgaagtaggaagtaggtgtcgaccagaaatgaacccattagaccccctaatatcaccttggtttttgttatgcggacacttcgatccggcagatcagtaactcagtaacttcgcttaacttcagggtgagtacggtcttgtacagtcttcgaatagatcgatccttacatctctagttgatttctataaatctggcatccatacgtagctagtaaatagtgatgatttcaaattttaaatttaatcaatacaatatctctttgtagttgaaagatcattaagagtaaattaaaagtattccgatcaaacattgatctatattaattgaaccatggacgaggctgttgattttatagagagagtatctaagtactgaccaataacgtattttactaccgagtgggccaccactagcgagtaggccacccatccaaaacgcgtcgattaatttaaacccttcttcttctgtcagaatctaggatgaataccgtcatttttcatccctgatacaattgggtcacgtgactgaccaggctggttttccgcccgaaaaacatcctttcattttgttttgtttgtttgattactaagttgtccatcagattgtcatgttttccggactattgtcatttttagagagttagagaattgattgagatttttctgccacatatacattcgccttaccaccgtttttccgtcaggttcatatataggtcaatgccgttatagttatccaaccatcacttgcgtaataaggccatatccctagggctgaccgtaagagggctcaggtgatcaacaagacgtccaacgagactacattagtatatgaagagcgatatcatttaaaatagcagtgatattaggcgatttttaggatctactacgcaacacagaacaagcgcttttcgacacgcctctccactatattgacatagtatccgaacaacattggcgtcgaggccatcctattgagttttgcattccattccaagtgacagcctgtgtcgggatttaatttttccatttctacgctctggcggaacttagtgggccttgggaacgaatgagcatgctgaaccacgaatgcttttgctcgcagtgtgcagcaatcctatcccacacctggaggctctcttcccgacgcgcgcaccttcctccaaggtaaccgaattactaccttactacccaccctgtgattttgaaaccttatcccctcctacttttcttgctgtatcttcacagtttctctctctctcaatttccgcagaacctgtgacgaatcttatgtggtgatgtttgatgcctgtgttgatgcctgctgccgcaggcatcctttatgtatttagatcgtctctcattctctcacacactctctctgctgttgcggccaacctgcagaagcaaacacgacttttccgtatgttaatttgccttatttgaattaccgatacattccctcctgaacaaccccccgccccgccccttcccccctaagaccaaatccaaattccttttcaatatcctctcaaccacaaagccattctcagaaagcatctctcagagccccaccacaagaaccgccctgtatgaaaccgcgcacaacccacaccttcccgcccggcgcgaggaaccactgcatggtgcgcgcgaggttcttctgctgcgagcgaaactctccgctactatgatctgggtaaacgagcccttgtattgctgtgtgaaggagtcggtcagttcgcccttatgcgtgggggtgggcggagatcttggtgcttggtgctcggttgcagaggttgtagtccatgttgaacgctattgcgcctgagagggcgggcgaggggcggtctgttgccacgacggtggatgctttggctagggcgcagattagggaggggagagcggcgtctacattgtatcaagtgtgagcctgacgatcaaggattctggagggatttgtatactagtacgaaagatagtagtaactcatcagcgcccagctcaagcacactctcacccttgacactctacgtctcgtgaatcctctttccacgcattcgtcttaggactcatctgagtactggaatcggcatcttccacacctcggcgacaaccatcgtcgcgctgcaaagcagatgggcgaataacttccgccccacctccaacttattcagcccatctgtcttctccaacccggctgcagtctcctcggtgcgcttctaggcctggcctgggtaggttgggaccatgatttcgagatctccatagcgcggggacgagtagaggtgctgggcggtgccgctgtggaaaaagggcgcgtcatctggagggagatgtggaaggaaagcgccttgccttccaaggcacggtgggtgggagtgtcggcacacgtccgcagggacgatcatcattttagatcatctcaatcgaagctgcacttcatccattctcattctcaggtcacttgtttctctatagagcagtgtcaaaggaaaagcgagaagagtgacagccgggaaaagctcaaccgagttggcgacaatgattctgcaccccgcagggaacctggtctagcgccgagtctatcccctgttcagggctttgtgccacgactcgatgggttctagccaaaccatacggcttgcagcttaaactgtgacagattcccagaccgcgtatcgaagcaaagaccctagatcagtagtaccatcacgagctaagactgaaccagtcttaagttcctttaaacggtcaagagttttatcaatgacctcgcccatcccactcgcgtggaaaaatttcgcaagtcgatagtgatagtctaacaagaccgggtgtggaagacgggactctgactcaggctgggatgcatctacgaaagtgacctggtgggggaggaatgggttcatttcggtggggaagcgcttgaaggtgacgaagttgtacgtatgcggagcgttggcctaagtcgataattagtcctaaacgaacccttcactttccagggctagaacacagacgcacgatcggctcgaaggcacatcggaagcgaccgaatgcgcggtggatagaatggtgaagcgtgaggccattctcgatctcattgattctggaacttcgcatgattgtgcgtatctcagggaaacatcggtagagggtttcccacatattcgagatggtgcttgcacctttctgctctaattagtatgtagtcttcaacaagaaggctctaggaaaagtaccatggggtcgtagcttgcaaacgaccagggaatgatatgcgcagcttcgagatccccctgtagaacatcctccgccgaccctgtttcttccgccttgtcgaacgatatggcttttgtcaccacacaacgatctctatcacgttcgagacagcccttgcggaaatccgaatctcgcacttgcggctcctcaatcacctcatacacggcttgagcattctcacgtcttttttgatgcggtgagtcaacaggggcaggtgtttttccgccagacgctttaactatgcgaggtcagtcacatattcacgccaagtttgcatggacttactcggttggaggagacaagtgcgaatattctcataggtagccaggagcatctcgtcagattccgcatcgagaatatcgtgcgcgatagagtttcttcctcctggcggaagccagtcaagcagccccccaaagcagtcttgcggcttttcggattcctttgtgacctcgtatcgactgagtcgttcatgcgtgcgagctttaagatcattccagccatcttcggtcttctcgacctcagtctgagcgaagctaggctctgaacaaaatgtcccttgggacggagagattcgacgcggttggcgggggcgggttgaggagcggggcggtgggggtggagatgattcgtgcttgcgcttaggcattgttaggggttgcagaggacaaggatgtagtgtcaagaggtgttcgagggatagcaacactgcagttaagccttaaagactattaaatgcgttcgtgaaaagaagtcttctgcattgggccgttaggggcaagagctgtcccattggtctcaggagggcaaagcggtaaaaaagaaagcttggcagtatgacataaatagcaagcggtgtacccatatacttagaagacgggagcaatgagcagcttggagtctgattgcttctttgttttcccccacattctctgagccttctctaactagtcctcttgtattaatttaataagcgaaactcaacccgtcatagacagaatttatggcactttgatcctccgtacgcaaaacggtggttcacccctgatctcaaatctcagcaaaaggaggtaaactatacgcgacgcaaatggcaagagagctgcgcagagataaggcgactattaggcaactagatcacagtaatctttctaacgcgggttgagcaggagaattgttcacccgagccggcattgtcccattccctattttccaagcggtatacagaatatacgcccgccggtagacgatcggtagaagggcgcataaagcaatacaagggtataataaatattatgacaacgccaatcacactccatgttctatgaatacttttaccaggataagtttggatggtggtaacatcgccaatctcggtagatgagggcactgtgggtcggcttaccatcatgtcagtgtccatgcccattccttgaaagtatgaaaaacctactagtatagtggattccgagccatggccggctcatcattatcttgagtcagggagggggtttgtaattccacggtgggtgccatggcaggctcatcatcattttgagttggtaagggagtttggaattccatggttggtggacggatggtgagtggatggatgaacgaaggattgatgaatgaaggacggatgaaggaggattggagataggggcggagggtggaatataaagagaagaagggagaaggaagagggaaggaaggatggaagatggcaaacaaaaaggctcagagtacaaaatgactctatgtcacatgcgaggcttttgggatatctgttttccctttctagctactcttcttcaacatcataatccatcacattcatgcctcatcgcaatcagtatggcatccctgtcacttttcagacaaagagctaaccatgaggcattcagtcatggcattcgacgcttctactgcccctcgaccccttctgggcaaagatggagcagagcctggcttctgggctcatgctgcatacgagaacccctggccccgaggaagccgaaacagccatatgagtggctcagtactttatcaacttcaccaaaaccgtttgtatcgcgagccggctttacggccatcaaaagccaagtatgatggaacacgctttttaaaggcagtgggggacaagactgtgaatgtggaggctctgctggcacaggctaccggtccccagctgaaacctggggcagaatgtctgccttgccagaaacacagaggccctttcgtctcctgtgtcgttgtcccgggtattttcagcgaatgtgccaactgccattggtcacagcagtccgatcgatgcagcttcaacaccagccctcccatgtcatttgtccctcgacggaaggctgagcccacagtcatccccactggctttacagatacggatggggtgagaacaaaattgacggggagcttcgagaggcacgtcttgcgcgaggtaaggccatggcactttgttgaacgtctcaacaggcggattgatgagattctggaagcaaaggccgcccaggcatcacggcctgcaggtggagaggactaagggcctggaggtcttggaaactagcatgtgaaatagtgcttgtatgaactacatttctgacacaggctcgccatccagtacacatacgtactattttctctaaagttcggtatctaggccacgctctccaggaggaatggattggcagacaatcagagtaagcataacagtattaaaacgcagaagaatgataacaccctgatgcggtcccattactccgatccccgacactctaagaggcagagctactgtatcggggacgtttgacggccctccgacgagtgctcgccttgcttgtgcgtccagtggtcattggtgactgcgtagacgccgagtggataatttggaggaggatgcgaacgatctcctcgtcctggctgtcttccagaccccagtggaaggtcctcacggaccactttcgaatgtcagaccaatgaaacaacggttaacgtgaaggtcactttcttcttaccttgctgttcttactgatcttgtaaaagtggaactgtctgctgtcggtcacaatcccgtatacagtggtgtctttttttccgcgctcctttcgtccggagtgcacgacacctagaagctggtcagcaatgcctttggcgtggtgcaatagacttacccatataggcaaggacttgtttctgccctttgccaatttcgtccgaggtcttcgtctctacaatcaccaggttggtctccagatcctcatgctccccataccatagcgtatagtcggggcggccattcagcctgtgcttgagcttcattcggccgagtcgggtaatatgcgagaatgaggcctcgtagctccatctcaccggatgtgccaccgcaataccgacttctatggcgaagccaagaacagcgctgaacagagggctaagccaagcgcgtacccatgcctcggtctctcgggacccagcttggcaattgtgctggtagcgcattgctcgcgctatgagaacaaattagtacagggctaatgttaggaggacagggaactcacagaggtagcgcataaattcaggaaatacgtcctggttgtttagagctgcggtatcgaacgggggtatgtcccaggaatctcccgcctttaggttcttctgggtcacctgggtgagcctaaaaattgactcaacctcttgcgaggtcaagtccttcgttgggaggttattgtccctcctagctctcgtcgtgatgtcgttaagttcggtcttcatctcgtcaacctcggacctcccaaggtttgtagcccttgaaagccatcgaatggccgcttctgcgccattcttgacctgtatccaagcgaggtcgtcggaagttgctttcttcttcggcaccaccttcgttttcctaagggagaacttgagaggcattatgaaaagattaggggtgttaatgaggatgattgtgaggtactcttgtgtagggtagggggaaagaggacagaaatggtgggaaacagtggtgaacagtggtatagtttgtgttggcctgaggcatcacataaaactttcccgttgcgtcattccgcgccgaatctcgtttgacaacatatctgtggacgacgcagaacaatgaaatatgcaattcttacgcagaatgcactcaaacgggcttcaatagattattacttatgcggccagactgtatgtcactctaccaacaggtggtatcacgtgtctccttgcagacccagaccaagtctcgaaccgcgactagaggacctagggaaagtaattgtcgacgagtactcaatcgtccgtgataaatatagtccgttatttttggttcgaatagtgtgaataattgctgactcgtcatcagctgcaccaaaataccctgtcgttctcgcccatggcttgctcgggtttgatgaactgcaccttgctggcccatatctccccggtgttcagtactggcgtggaatcaaagaggccttgacggcgcggggtatcgaagttatcacggcgtcagtgcccccgtcaggctctattgaggaacggggtgaacaattggcccgaagcattgaggctggggctccagggaaggatgttaatatcattgcgtatgttccctccatttcctggttagagatatcgacatattctgaccctagtttttgtacagacatagcatggtgagacccctcaatcattgcgacagagttaatgcttatctgtgattaggggtgagcaataagatcatactatacagcacaagctaattaatgggctgcaaagtggtcttgatgcacgatatatgattactcacgtacgaccggagaagttcaaagtcttgtcactgaccactatcgcgtctccgcatcgaggtgtggcgcatcatagcttctcatttgcctttctgctaactgtctagcaggctcatctgtggcggactacgtatttgatcaaattggaggttcgtgactattcacccgctttctgagataactctgaagataacatctaattctgtgtagccgatcgcctaccccaaatctattatgcccttaatcgattaaatgtcgagacaggtgcattcgctcagctaacaagaaaatacatgaccgggactttcaatcctaataccccagatatggatgatgtcaggtaagtgccatgcatttccccccctatacgcactgctgacattccccagatatttctcctatggagcagcaatggagccaagtatatggtccccctttcggctttcacaccgagtacttgcggatattgagggacccaatgatggcctagttagcgtgtctagtagccgctggggaggcgatgcaggatacaaaggaacccttatgggcgtgagccatctggacctgatcaactggaccaaccggcttaagtggctagtcggggaagtaacgggcaacaaacgaaagttagttgattacaattacaagaagtattttgggaattatgctgatctttatgcaggttcaacgccattgcattttacttggacatcgcaggtatgtgttacggtttgattgggttaactgagactgataagctgattgttaattagacatgttggcaaaagagggactttgagaaagtgcccgatataattcatgtgggttcccccttagcggtgttatggctgtttcggatttgatatggaaattctggtgcctggagactcctggagactcctggaagtccctggtatgttctcattctcgcctactttgtatgtatggacatatttttgtacagtggaatcagcataatagatccgtcaattagcaacagacagttaaaataatatatttactcaaggatgcaggcaaagaagggtcatactatgtactacagatccaacggatttatagtttccgggtactagcggaatgagccctttgtctcgaaaagtgtggctgtgattgaggcgcagcatatatgcctaatccaaccttctagcctttagctattcctgcaacagttcttggtcagggcgagaccgcggcagttgtctgttgcttggcaatcagttgatctgcgaacgctcaaaacgtcattgcgggaaccttcgcatataatccgcactcgcccccatctcgcagccccacgacatttcttcaagctgttcattatttgcatatttcgagagcttgataattgtcgcattattttccacgaccgcacccccctatttgatccttcgaacgccgccaccaaccgaagatagagccccgccagggcccacgcgcccgccgccatgaccgcaaatatcgtattggacagccaccacacgcattatacaaatttggacttcctcagaggcaaggttgtactacagctaccgaccgaagcagccatcggagccattcacgtcaaattggagtgcgagagccgcactcgtctatccggtcccaagcacccccaacatgtgcactcagacaaaaagcgaacggagcttgaggttcacaaggtgagaggatatggtttatcacacctatcagtgggataaaatattgactggagcattggttaatcaacgaatgtagatcctgtacaaggttgccactgttttcccgacaccaggtgtcatgcagaatgggtcccctgcgcctgcatatacatttgctgcagggtcatatgagtaccctttcgaattcaaagtaaagagtctattctatggcaatcagaacacagttaacgccctaccagttccctttcaataattcatgcagcacgaccaacagcatgctcaccaatctaaacttttccgggttgaaagtcgaggtagctaaagacaccaatcgacacgtcaggaagactctcccgccatctttaagcgggttcccaggtgtagcagatatcaaatacttcgtcaaggccacagtcattcggccgcagttctacaaagagaacatcagatcggtaagtagtgatatgctccgatacctatgctattgtcgcactcgctaattggtttcgcagattgtgcctctgaatttccttccaattgagccaccaagagtcgggaatcccaatgaggaaacctacgccaggcggcaacatcaattctccaaaacccagggcgcgtctaagaaaaagagcatattctcacgggggtcttcttcactccgagagacgtacccagagcctcctcgggtgtctgtggatgctcgacttccgaacccgtctattctcacttgcaacgaacctgtccccctccgtctcctcgttaagaagctgaccaagggaccggacgtaatctttcttcaaatgttgcaggtggaactaatatcctacacgaaaattttggcccaagacctcactcgcactgaaagcagctcgtgggttatcatgagccgcagcaatatgaatatcccgttaggcaacccggaggactccgtaggcactgattggactattgattcaaacttatggaatcggtatcccttacctaactcggtggcaccgtcctttgagacatgtaacattgaaagatcttatgagctggaaattcgagtgggcttgactcatggaatgcaggtatgttgaaccattaaccactagagttgtctcttggctgaccatggcatagcctcaactgattgttctgcccctgcgaatgccagtcaaagtattctcaggaatcgctccaccacaggccctcctagatgcgatggccgctgcatcgcttcatccatcttcctctagactgaaaccccagcccagcttgccaggagaggtaggaagcagtcgaccagtcatgccaccacgaccaaccggtgaacctgtacctgtcaattccggagatgcatacgacgacgcaccacccagttacgaggatgccatgggagaccacctgagtccagtggatggaccacgtcgcgagtatcacccaccagacgcctcatcacaaagcacagtagaatctggagctgatgccaagtccatagcccaaccgggtaaggcgcttgaggatggacccgctgcggaaggatcctcggcgcctcgtcgaggcaatcgtgcttcctcggagtccttcgacatgctacctaccacaccaccggaatctcaatctggatcgcctcccatatcccccgtgcgacgcccagcgagcatgatgaaaatttctcagaacaccgttgatgaagaaagtccgccgcaatatgagcctgtcgcggggaatcacctgaacgctccccaagctgtgcaacgccagccttcacggaataatcttcgtcctatgaacttgggcgttcccaatcggaagcctgtgccgcgaagtccaaatccttgaggttatggactcaactgtttcactaatttggtcatattctcccctctttcacgcttagtgtccgggtttgaaattaattggagcttcatggcactttgcctgtgattattccagcactcatagcattacccatcaaagaaactgcattattgctaccttcgaactcgataccccatcacgtttgtgtcttgaaaagtttttcaggttatgttcttgttcttgaaatgcatcatagcgttgtgtctaagggatctataatactagtactggtgtagcgcctgttgaatatgatagtttatttacttccacttccgaataatgagccaaataccgtccgatatcatcgtggcgcgcatcgtggcgcgcaggtcagtatggaaataagttcagatgtgcgctataccgaaaacggctagcgcaccctccacgcggattgagctttcctcttccacttgagcatatgtccaatcctatgggcatctgtcctcaaattgaatcttaatcgaaatccgctagaccagctcggactaactggattagccccccgaccgaaacattaccctcgagtattcgactcggaacctcctagcaacacgaaaaagtacattcaccgcgtcaatgatttagctcgcgactgaccatccacgatgcgtctccaccttgttatctcgcgccatggcctgccggtcacgcgcattctctggacgacgacttcgtctacttctgtgttaggcgaatatgggactcaacgcccggcatcaaccgcagctgtcgcgtcctctcgcaccccgaacatcgccttctcgaatggcgggtacacggtcgcacaactcctcgaggatgtgaacgaagttgtgccgctggaaactgaacctagtatctttgatacggagttcagtggccagtggggattggaagattatgttgtcgaggttgccggctcggaatgtctccattttatggaggttgacggcttgctccgtgacggagacgaagttgtgtatgtacatctaacaaatgttcttatatcgtaaactggactaatttctcgccttctagcatccgcgcccttcaattggcagacctacggaccagaaggctatgtggtcgccaccaaattaccgcggagggcaagcatctgatcgacggcgtgcctttcgggtcaccgttcttgaaaagaactacctctacacgacctgcaataactattcccccaagaaagaagcggcgcaccgttttctccggctgggaccacgctccagaattggtggctgaggaagtccatgctgacgaggaaggggatggagagtggcttccgcatccaaacaccgggttcggaaaggagctctctgtcatgcccgccgagcacgaagagtccctaggcacggttattcgtcaccctgttgaccatgccacggaatctgacagtgaagtggatatgtctgagatgcctgaggttgaggaagatgaactggagagcgaactccaagcactcaaagaggacttcgacgaagcttctcaatttattgatatcaggaaccagactcggaatgccagtgggcacccactacgtgctacctcgatagtcaagcgaccaacttccaaggggtcacttgcagctgcctcatctctttccagcaagcggtctcgtgcggaagacccatctcctagagcctccaaggctgtgagattcaacaagggagataagcaggaggataaggaaatgcctgatctcccacaacttccgcaggccgtacacgtacagatcgaggaaagtgctgctgcaacctctgattctggttcatccgagtcatccatgtcttcttcgggcagcgattctgacgatgattctgatgatgattccgataatgattccgatgatgattctgatgatgttgattcttcgagcgaggtcgagcctgcggcagaggcaccttctgattctcattcatcctcaagctccgatgattctgattcatcagactcagattccgaagaggaagccgccccttctatcccggtttctgtgggcgctcctggtggagggtcactacgcactaaaaaaaacaaccagcgcatcaaactacgccgccgtctatccaagctcaaggagctaggtgctcttcctgaaaaagcaggtttcgatgcattgcgagcttgggaagacagccacggaggctggcatactccggaacaatatcttaacccggagccattcgtgcaacccccaaaacctgtggaaccggaactagaaccagaaccagaacctgccgaatcttcgaaaaagaagcaaaaaagagagaagaaagaccaggagcaaaaagagttcgaagccaggcgccaaaaattgcttaacgatcttgcattgggtaatggtgtcgatgtgagcgaaatatcggaaaaggaaaatgtcccaccggctgcgtctgccgttggagacacccctgtttcagaagaaatctccggtaaggaagagccggagcaggaaccttcgaaccgacgtacactggacatagctagctcacgacgcatgctgttcggatctcttggaatgcgaaccccgaagaccaaggaagacgaagaagaaacacggagaaagcttgctgccaaagctagtgcatgcggtccccgaaacaaaccctctaagcaagacatcggagaagaggccgaccagatgcaagaggaggaagatgcatccgacattgattggcaaaacaagcttgtcattcgtgctgtcgagtgtctctatccccaggttgatatgaccgcgcctccttatccatttgttcaacgttgggataaagaagccaatgccttgattcgtgagctcaaagggcccagtaagaagcggaagagaaagcagcgtgttcaagtctatgagggacatgagcaagaagaatacgatgaaaacgggtattattacggccatgatgacaaatatcaagctaatgaccaaccgaataacggttattacgaaggtgaagccgattcccattatgagggccaatgggaaggcgaagctgctccttactatgaaggccattatgcaggcgaagctgaaggagatcagatcgattatgacgatgctcctgagcctggacaagcacccaaccccactttggatgacctacctgcgattcctgccgacatgagttctgttcctggtttgacagaaagtgaagcaaaggtcggcgcaatcattgcattccggcagctagacatgtccaaagccacgaactggcaacctcaaatgtctgagtaccgagtagccgaggtacgctctattaaagaccatggggtgattaatgtactactggccaagcgggaccgaaagccccactcagcatccagcgagtatgacgagccccgtcgattcagcaaatttgaagtaccagacttagccaacgatgagggagaggatgatggctatcgcgagcttgcctttgcggaactcagcgatccgaagcttatccaacccgcagcgcagtcaggtgcggaatttgaaggccagaacagagaaggtagcatgtcagtgaaataaactctgattgaaggcttatgcttacatatctaaagtgtctctgtagttcatgaatccgtactgaacgcccagccaaccctttccgaggaaatgtatattgacgacacaaccattgtcaccatcggaaatgaagtcagccatattgagtcgcctcgtgaatccccgggaatgcccgatgaacctatccaacaaaccccaggcagagacctgccgcagattcaagtccagagtggatcgattcagcgcagtgtcactcctcccatcccttcaccttcttttactggatttcactctgctcgatcctggcagcagatgacccctggtgtagagttcagccgggagcttgaaggccatactctcatcggaggagacacgccatctgctctagtcaatcgggacgaagatccttccgccttgtcatacgcttctgcaaatcaatccttcgcggatgaaaccgaggaccaggaaatgtcggagcatcaagagcatgagcgccagattgtcagtgaaaatattttaccgcctggcgattcgggggacagcggtcctcagtctggctcacttctgtctaccattgaccgtagcggtggtaatggtggtcagggtggtaatagtagtgatgatgatgcgtcggattccgattctctgtttgtgaaaagcgatacgaagagagaaaaacatagtgtggctcccaccagctcttctgaatcatggaaagatcttttgaacagattaaggaatggtccaccagacccagacagcaacaacagcagcaacagcgaagccaacagcgaagccaacagcgaagccaacagcgaagccaacagcgaagccaacagcgaagccaacagcgaagccaacagcgaagccaacagcgaagccaacagcgaagccaacagcgaagccaacaacagcgaagccaacaacagcgaagccaacaacagcgaagccaacaacagcgaagccaacaacagcgaagccaacaatagcgaagacaacaacagcgaagttagcgaaggcaatcaaagtcccgagcggctggaagatagtctgcagcactcctacctggatctcaatttctcatcgctcgatttcccacggccatccaactcacactctcccaacccgccaacgagtgcccaaccggacgcgcagtctcaaaaacaaacctcaatcctttcgccatttgagacgaagcccgccgcaactactcgctccatactctcccagcgggtgcatgaacccgaatccgcctcccaaattctctcctcccaggcatccgaagtgattgacctcacttccagcccacgtgaatcacccaaacccagcagctccgatccgaacccatcccagcgctccaaatctgcagtgtatgggaaatcacaacgtagcaaggacatccctcgctcatctggacgtccaccccgagcttctacggggagactccaacacatggtggaagtgagtattagtccttccagccagaagaagaagcgctcggcacgaaagttctgagatacggctggattatgtgtcattgaaagttgaagagatattggatgtactttcattttacacgtctgtatatttacgggcgcagagcgatggcgtctaggaacttgcacattctttctttttttttttcctggacattattttatttcggctccaatacaagatattattctgaaggtccttgcagatcatgacaaaaccctgccagtgattggttggattcatggataaggtgatgtcatggtagttgtatacttcaagctctagaggtattgtacatctcccacatcttcgaagccttgcagtcaatcaattgaactaaccaaggaactggcctaggaaagcaggttcttctttcatcttccctttttccctgcccctaaccatgtaccgtctaagtacgtggccatctatgcaactatcccggcggtgtaactttctactctcgtcattacgccatatttcctcaccccgcatatccagcttatcctggacctcttctgctgctgcttcttcttcctcgtctatcccttcaatatctaccaagtcgtcccaatttaagccaattcaatccaaacgcaatctatccacaatgccccaggaatacaaactaaaggacatctcctccttcgcatccctcaactctctagacaaggtcgaggttgaaatcgaaggcattgaggatgggaaggttctcctcgtgaagctgaacgataaagtctatgcccttagtccacggtgcacgcattacggagcaccactgaagaatggcgttgtcactgcagaagggaggattacatgtccctggcatggaggtgagatgcttgtttgagtttcttttggttaggggaaagaaaagaacaaaatactaactactatatctacagcctgctacaatgtcgcaactggcgatgttgaagatgctccagctcccaacgcgctgaacaaattcgaggtcttcgaaagagcaggcggcgtctacatccttgccaaagaagaagatgtcaaagcaggacagcgcaatccagttgtgaaatgcactgtgtcacagccaaaggagaaggttgttgtgattggagggtaagtcacccttttttccttcatcactatgcacatgtttctacatttcctctcgttcgaataattggatacccatactaacaacaaacagaggaagtggaactcttggccttatccaagctctccgcgagctaaaataccccggggcgatcacaatcatctccaaagagcccgatctgatcatagatcgaaccaagctatccaaagccctaatcacggacgcagccaaaatccaatggcgaccacgagagtggtatgctgaagccgccatagaaactatcacagatgaagtgactgccgtggacttcgaacagaaatccatctccaccaaatccggccaaaacatcccctacaccaaactagtcctagcatcaggcggcaccccacgcagactcccgctacaaggcttcaaaggcgagctcaagaacgtcttcacccttcgcaccatccaagatgtccgatcaatcctcgcagcagccggcgaagagagaagaaacatcgtggtaatcggcagctccttcatcggcatggaagtcggcaacgcgctctcaaaatcccacaatgtgacaatagtaggcatggaaacctcgccaatggagcgtgtaatgggcgcacaagtcggccgcatcttccaatcaaacctagaaaaagccggcatcaaattccacctctcagcgaacgtgagccatgctacagcctcctcctcagatccgcacaccgtcggtactgtccatctaaagaacggaacaagcctcccagccgaccttgtcattcaaggcgtgggcgtccgcccagcgacagacttccttcacgacaacaaatccataacccttgagaaagacggctccgtcaaaacaaccccccacttcgtcgtgccgggcttgcaagactccgtcttcgccgtcggcgatatagcaacatacccctaccacggtcccggcgctgaccctgccggctcgccagtccgcatcgagcactgggacgtcgcgcagaacgcgggccgtgctgctgcacgagcaatcgtgcatgcgctgtgtggtccgctgtcgtccctgaaacataaggtgtttattccggtgttttggtccgcgcttggggcgcagttgcggtactgtggaaatcccattaacgggtatgacgatgttattttgcaggagaagggggaggcgaaattcgttgcgttctatacggctggagagaccgttgtggcggttgccactatgggagttgatccggttatggttaagtctgcagagctgatgagagtcgggaagatgccgagcaagggagatattgctggtggtacggatgttttgagtcttaaggtttagctaggatatgatgggatttgaagtttggatcttaatggatatgtcgggaaatagtttggaatcaagtgttttctttggtcaattggcatatacacattcgaaacaaatcggaaaataagaacaagcaaaccggaacgcccatccaggatgtagtcaacattgatgtatgatatcggtgctcatggagacatgtacacagagcgaatttattcgtccttgctcttcttcgacttggaagtggacttcttctccttcttttccttcttctccttcactttcttctccttcttttctttcttttccttcttagggctaggctccagatgcacatccacagtcgacagctcttgcactgccgacgccgccgggacgtccatcacgggaatagacccagagagcttcttcggcgatgggaagaacgacggaggcaaggactgtccctggcgctcagactcagagagtctctcctcctcctcaacagaaagcatagtcccctcaatactaaggaacccgcgatcgcgctccgaaccaggaatgacatccacatcaacaacacggaagcgcacagagccagttacgcggtgtccagaaacagactggaagtaaccggtgtgagcagacgcatcctcctcgccctcgatcgcgatctcctcagccgaaagcgaagcaggcttgaaacattccttctcggcgtcgaagtcggccatatccccatcagaggccgagtcgtcatcggtcaaagccggcgtctcggcctcctcgccaggcggcacccacttccagttcgaaggcagacgcttgcgctcaacgccgacagagaacaagttgaacacgacagcgccgaggaatccctccgactgcacattcacccatccatcgagagtctggccgcgctttggccggaacattaggaacgtagcggtcaggtagacgtacaagacaccgtactcgtccgcggatttggcgagggtgagcggctccgggttcggatccgagaaagagcttgtattggccggcggattgctggaaatcgaggcatgggagtacgccaggacgatgcccttcagcggtgggaagtaggttaggagcagtggcgagagatgctcggccagcagcgaggccagcgcgtgcgttggcgagatggagatgggcgacaggggcaggtagagggttgctgttgtgagagtgaagggggactcgggatcggagtcttggacatgttgtggagcggcggcttttgaggatggggtttgctttcgctttttggatggtgatgtggatgcagatgcgtccttgtttttggatttgcgcttgcgctctgcgtccgctgtgcgcagcggcatgttgtcgatttccatttcgtcaattgccatcgtggaggcaatttgggcgctccacggagcttgtcgtgtcaatgtggagggattagagtgcttcttttttttttctttttggcgtcgagaactttttttttcatttggcttttggtatgacgagatgggaaggcggtgggactgggcggtgacggcacattaaatggcccccggactattttggggttggttacaatcgccaagtggcgcttagtatctattctatcaatatttttcttatttttgtttgatatggtgcaggtgaggttattcaggtgaaattgattccctcgtgatgtcgtcacttctgcctttcttcgggtgggctgttctccccaatgtgagtggagcgcgatgcggagctatacaacacgtggaataggagctaatatgaatgacagtatgctacatcgtttctacagagtgtctactatggcatcaccatacgcgccggtgaacccaagccactcccgcaaactccgcggttcgaacgtcatcgtcgccgtatcttcatcttcgtgatcaccagctacctcctctacacgctctacgagacattctaccaggtgcagcttgcaggtgattactatcaagccctcggggtatcgccatttgccgatgaacgcgcaatcaagacccgatttcgccggctcgctgctcagtatcaccccgataaagtcgggctggacagcgggtccgatgcttacttcctgtaccttcgacgcgcgcaggaaacattggtggacccggtgaagcgattcgcgtatgaccggtttggaacagacatgcttggatggggggagcagaagaccatgcgcgacttcttgatgacctcgctggtcaagtcgatcatcccgcaatatgtcgtcgggtttatcacaacgcttgtgctgaactggctgtggtgggcgaattggggccgttacgtgagtataccatattaccagcagatgttcaattccattcgctgactgttgttagtggcgcttctacacgttcgccgcaatgctgaccctcgaactcggcttgattacgcaccccaaggctgtgttcatgcctacctcataccttcccgtcgcgctacaagcatggctccctagacaatcgttctacctcctccccttccagatcctgacgctagcacgccgcgcctccatcatgctacacattttcatctcgcaggccgcaccacccaccgccaaaatggccgggaatggcaacggcgataagatatcaccgcagactgtgcagcggatcggagagttgatccagttgacgcgcggcacggatatggaggcgacgcgggcgctgcagatgggcctcgcacctttccgtggtgatcgtgaaaatgtgtcgaggctccggcggggtatgaaggaagggctgatcctcggcggggtgcggtccagtcctgaggtgcaacgtgccgtggcacaagtggttgaacgacgcaaggccgagggtgacagtaagcgcgattgatggttgaaagaggttagatgtatattacatataagctattgtattcccattgtaatccgacccgattctgaatttttgtcatttatctggacgatctcttggcggtgtcgcgtaatttggccattcttttggttccgtggactaattagcgaagttcacgtttccctggcacgtagagccgtagagccgtggtggcttgagaagactctcgtgataccctcaccagatctgttgagaatgggtccctctggactggatctccaatagatgtgagttatctgagtgaacgacgaaaaagacgcatctctcgagacatcatgcggtcagtgagttattttttctccgggatgcagcgggtgtgaaatgagatcaacggattagggttgggtttgtgtatggagatatggaatgtcgagtttctagccctgtacgagagggcaatagccggacggagagaagacgcagatatcatagacaaatccaatacaaatacaaatataagaagagaccaaaagacgaacaaaagaaacgaagctgtatatcggtatcgtacggtactgtcaccccctcgtatcacgccctccccgttggtcccgaagtggctggacgcaagttgtaatgacagtaccaggcccgatgtccacaccttcaacaccatcccctgtgcttcatggcctgaatgagttttttttttcttaaacgatgaagagggcccacgatccctttttacttcgccccttccttgtccttcttccctttccccttcccccttccccctcccatccctctttctcacagactatgcgactacacatacttcttcatctataacgggcggtagagacacataccacgtcacggtgaattgccttccgtcaattattccccttccatatccggtaccgcgcaaatcccgtttccaacacccatccatcatgcccgccgctactccaaatggtcgctcacgcggagccaagaattcacccaactccttgatggtggttctcaagctatctggggatgccctccagcagttcgccagtcccagcaagagccaaaataatactcccaacattaaatccaacgacaactcttcaccagcctcctccgccgagctccctactgtccgcccatcttctgccgataatggctccgacgccgacgccaattctacgcccgccacaggggcgactgcaggcgatgcacaacgtcggaagggagttccgggtcctaagccaggaaacaaaagaacaaaagaccaaaccgaccctaccgcaaagtcacggggacgccctggccccaagaagaaacccagactgtaagccaacccgacacattttcgaatgagcataattccagaaaagaaaatagtcgaactaacatatcatcgatcttagtgacgaaggcgaagccacaaagattccagctgcacagcgtctgggaccaaaagccaatacgggagccatcaacgccggtctgcgcgcgctagatcgcaccggagccgcgtgtcgcaaatgggagcgcaagcccctacagctccgcagcttcaccggcattttgtggcaacttccatcctggcgcacaccgggtatgcccaagtccggtgacgcggttaatggcaaggttgcagcgctggaaagtggcgacagcgacacaaagaccacgcttcatgcccccggcaccgacacggccaatggcagcagtgctgtgcctagtgagaagagcaactctggggatggcgatgtcacccctacttctcatctagtcgagccctcctcgccagccattgctatgacagcttgaatacgaccgtgacgagttcggatgtggttttcgtgctgtacttataagtttcgcgcatcttctgtgtctttctttcttcttctttacttagggttttatgtcggggttgggtttggcgttggagggaactgtttttatggctaatggcctttctgcacgaagggctctttttttccatgtgcacgggttgtagccggggatctggttatttccctcggtgtgttctgtattatagcccttttcttcttcttcttcttttttcttctgctgacatcagctatgtttacatcttctgctcgaagatcttgctctgtgggcacaacgcagttaattttgctcatgtggtctgtttatacatgatagtatagagctatatactactcccttagatctacctatgttgtatctacgtattaccgcctttcctatgctacatcttcccttgtgctcaccgagtactccatagacctgctctgatcatcatagatctgcttactgaacaagactgatccacccgtggactcactgatactcgctgagcgctctgattggttgtttcccgctgagtctgggccaggccgcagttttaggtttagcgcgcctccgtatactaagtagcatttttggctcgcaggccttgatgagctggtcgatgcaattaacgacccaacaattgctctccaagatgaggtgcgaggtgtacaatggatcttggagcatctgttcgaagaggaaaaacttccagcatcgttatacgatgaactagaatatagccgaggggtcaaatcctcggccaagtcctggacaaaaaccataagaaagattgctgttttttcatgaaggatggaaagtaatcctttgtggaaaatggtcccggaatcaaaggagcagagactggcaagtgaagacgttccaggtataacttcctagttaattttttggttatagcctttctaaactgaatacacggctacctctatacaagagctgagctcgccgtcaaagtcttggcgatatcgtgagaaatctgacacagctgcaaaagagtctagccgtggctgtctctgcatggacacatgcaccaacgagggcagtcaaagaccctgggataagaacaagaaccggctatcgatgaagatcaaggactatgttagcaaacttggtggcggctcattcttgtatcgagtgtctacttgggccgctttagctgcgatgatggcctttttcactccggtcattcacagtaggcacttggacaacgagttggggccgggtatctatacatccaattctctagaatgggtcctgaattgggttccgtcaatagtgccttgttggtcttcaaagaccctggtttccgcaatttggatgtctagaggccctctcttcccgagtggcagcagatcatcgtaacttggacacgaaagtcactttcgaatgcaccggattcggtacatccgaaatgaagaacagcagacatcatccaagggtatttcgaagccaggttctctaaaacaaactgtctaccacaacccagcaaggtctcatagaccgctgcatttagtcatacaggatgtggggcgctgtctgtatcattggcgatgataactagtgagcctggcccttatactatcactagcttcattatcaatcacacttttcattgtggagacgtaagctggccactcttttgctttgagtacttcctatagatggtccacattctcgctaaggacctcagccccaaggaaatcaccactgtcagcctcctttgacattttctacactgccaaagaccgacccgatgacgtcaagatcggagtcacaagtcaagcgcctcttcatgttttctcggactaggaggatggttattcgggatatttccatgcccaatcttaagcctgtctctgagattattgattcatcatattcctctcggctgtctggattggggttttgcctaaccaaattggggccgagaagttagtgatgtatttgtgatgacaaatgttatcggccagccttagctgactacatgcgaatgagttgtcagtcttacatgagatttggcgttctctttgtgtgtctctagattatatatagccaaaatccatattttctatagaagtatcgcaaaacatcttcatcatgggccaaccatcaatcccccctacccccacctcccccccggcnnnnnnnnnnnnnnnnnnnnnnnnnnnnnnnnnnnnnnnnnnnnnnnnnnnnnnnnnnnnnnnnnnnnnnnnnnnnnnnnnnnnnnnnnnnnnnnnnnnnnnnnnnnnnnnnnnnnnnnnnnnnnnnnnnnnnnnnnnnnnnnnnnnnnnnnnnnnnnnnnnnnnnnnnnnnnnnnnnnnnnnnnnnnnnnnnnnnnnnnnnnnnnnnnnnnnnnnnnnnnnnnnnnnnnnnnnnnnncccccccgcccagtgcggccggtaaaaccgccatcatcactggcggtaacactggaattggctacgaagtcgctcgtcagctcctcctcctcaaagcatcacgcgttattataaccgtccgatcaaccagcaaaggtcaggaagctgtcgcctcactacgcgcccatccggaagtgaaaaaagccaaccctaccgccacgattgaattcttccatctcgatcttgacgattttcaatccggcgtggagtttgcaaaaaagatccgcgccgaggtctctgaactacatattcttatctgcaacggtggtgtcaatctgatcagctacgaagctagcaagagtggtcatgaacgtgttatgcaggtcaactgctacactcatttcctagttacattagaactccttcctcttcttcgtgcgacggcagtgagctgtggcgaaccatcacgtctcacgttcgtcgggtcgagtatccaaaacttcaacacactggcgaaaaagcctctaacagattccaagactgtgatcgaacactacgatgacagacagatatacagcgggctaaatcggtacgcggatagtaaattagccgtgcatgcgttcgtgcagcgactagcgaacatcgtgccgtcttcagagcttatcatcaacgatctatgtcctggcatggtagctaccaacttcgaccgtggactgccgctctggttgaagcctgttatggccgtgttgaggaggctgattgcgagaacggtcgatgacggggcaaggacggttatctatgcggctgttgttgccgggcaggagacccatggaaagtttttgcagagtaacaaggtggatccgtgagtgcttccccctgcagtgaatactcgagcatgctaatgattactctagaggcgcacccatccttcaggagaaggtcggacagacctttagcgagagattgtggaaggacattatcacggaggctagcaagtatgacgccgagttgcagagctttgcttgatttataccacggaaattgttggacgtctctgttattatgttctgttctctatcagttactatggcttcgtgtgggataggccacagcatttatacacatctacgatgaagcatttcgatattatatacacaaaatgcataccagctccgccgtataatacggtaggacagttgtaaaggtcttgagtagtcagactatatcatcaactaacaaaacccactcaagaaatctactagaatatcaagcaccctcgcgtgaatctaatccgcaagccccttgcccaaataatccaacagattggtccgatgtgtttaatatagactagacatgcatcaaaaaaacggagctgcattagaggatggagtaccgtactaggcaagtatgaccagatcggttttaggacctacgctacaatctcttgccctgtcctggatatgatccgtcttgctcttcctcggttgctcggatgaatcgttggttcatacctatacgacattatgagcaatatatatctgagagttactcctttccttcatttacacaaatcatatagtaaaaccatttacttatcacctcatcaccatgaaccgcatcgacgtgcaccaccacttcatccccccggcctatgtcaacggtatcttaccttcccggaaacataataaacataattaacaagactatagccttcaactcaacctctggtgacccctccggctggcacctccccaaatggaccccagaatcgaccctctccttgatgacctcccattccacccgcgcagccattctctccctgaccgcaccgggcacctctatcctatccgattcccctatggactcagcggccctcgcccggcaagtgaatctctatggttgccaacttcaccgggaaaaccccactcggtttggtttctttgctagcctcccgcatctgacacctgaaaccatcccatcggccattgaggaagtcgcttatgctctggacacactccaggctgatggtatcactctgtacactcggtatagtggaactggatatctcggtcatgctgcttttgcgccactctgggaggaattgaaccgccgaaaggcagtagtttttatccatccgacaaacatcacttcggacgctcaggatcagcctcagatgggcattgcaaagctgccacagccgattattgattatcctcacgagacatgccgaaccgcggtcgacctgattacctctggagctatttcgaagaaccccgatgtcaagatcattctgtcccacggaggcggaacactgcctgttcttgctactcgggcggcaaatctattgtacgatgcgggtctgaccgagatcaccccagagatattcatggagcaggctaggggtttttatcttgatcttgcgctttccgggaacgaggggaatttggagttgctgttgggcaagaccgggtttgcaaagccaggtcatgtactatatggcagtgacttcccttatgctccagttaacaccattaacaagtatgtagggatgatggagggattcttcgcaagagaagaggagaaggaagaggagattgcccggggtgcggcggtagagttattcccgcgatttcggattgaggaggatagggaggaggtactgacgaacccaggctattgatagatacgtatatacagggttgtgtggagagaaatacattatcatttgacgatggtatacctgaaggggaacacttccatcttttacttcttagtattcaatctaacacttgtagtactttaacagatttcagcttctcattgataatgttaactagttaactagttaactaaataacagataggttattaataccggtgaatgaacatatctacaacgatcgatgtgtttactacatgcgaagaagctatgtatatcggtagcacagtacacgggcatgcctaagtccacatcagctcgtgacattatgctcgtctcccctcttttccttgacactgtccttctccccgcactctgtgcatgactgagactattcgtggtttctcaagatctagctatttcactatgacttatatcactgtgactagggtctgaaattccggatttgacggctgtatttctctttgaatataattatagtgaggtcgcaacgtggtaagatctgctgctttcggacctgtcacgcaacgtcggcacttttgccggtcttgtttccacgcatcttttacatattccagaccttccacgcactttcgcaccaaatgcacatatgatccccacgcactttgcgcagtagcttcaactaccacgcactagaaggtctgtcttcacacgcaccactacaatggctaatgcttagtaccacgcacttacagaacccctccactgagtagcgcaagtgtctaaacgaaagaactgtggagccaaaagccagaagcgaagcaggaacacagaaatagtggccttggtttcgtggcatcagttggggggcgacccgtgaacatcatggccgatgctccattctccccatccggtggagctcgagctccgacctcgtaccccaacatctcctccatcccacgccgctcctcctacgcttcagtagtatctggcaacacattttcctcaccaacctctacttccttctcacatctactcaacgactcccatccaatcccctaccccccgtccgacagccgagtccaccgggctccgttcggcgtggatgccgcagacatgcacatgaactccgcctggagaaacacaggttcaacagactcacttcctccctggtcccgcaagtatgccggctttctacgctcggccgagtttccgcacggcctaggtctcaccgacagcccggccttcctcattccatcttacctccgcaactcccgctacatcgcccgtctcgaaacagcccaccgcgctaagctcgctgctcagcagcgagaaccctcctcatccacaacctctaatcctcccctttccgcatcctccagcaatgtccatctgccccgcattgccccgtcgcaccgcggcatgacatatgatatcatagagaaggaaccgtcggcaccggccgatcccctcatgcccttgcctagccagtggagctccgtagacaagttttctggtctggaactgtctaacgaaaacttcgatgttcgctacactggtcccatgcacaagcatgatcatgaggccgctgccttgcgcgcagatcaccctatgccgccgcagtgcgggatctactactttgaagttaagattgagtcaaagccgaaggaagggtatgtggatgagctgctcggtggatattgggggtagaggctgacccttttttttctagcatgatcggcattggcttttctagccccaaagcgtccgttgagaggcttcccggttgggagacagaatcttgggcttaccatggtgatgatggaaagtcgttctttggcgagagtcaagcacaaggtcgagcgtatggaccgacgtttggtgctggcgatacagtcggatgtggtgtgaatttctctacaggatctgcgttcttcactaagaatggcgttttcttgggtaggtttttgtgtggaatgtaatgtggatatcttaggctaattttgacaggaaatgcgtttcacgatctgcgcaatacgaatcttttcccgtctgtcggaatgaagaaactaccgccagtacatctcaaaacgaactttggacaggagcctttcgtttttgatattgatggcatggtcaaggtttgtgctgtttccatcccatactcggaagttgtcgagctaattcccaccagcaagagagattcaacgttctgtcagagatcaacgaaacatccacggctggtctacaaccaccgttagacgagtcgacacttttgcaagagttagtagcacagttcctcgcccatgacggctacgtagacacggctcgtgcattcgcagaagaggtggccaccgaaacacgggccctgcagaacggtcgcaacgagccactgaagaaatacgaagtcgaggaagaccgcgaggctatcaaccggaacagtgagtctacacctccgcattcctcccatcgccaagtccccactgacagcccatagaaatccgctccgcaatcctagacggcgacatcgacaaggccctcaagcacaccaaagcttactactccaacgtcctagaagaccatccagaaatctacttcaaattgcgctgccgcaaattccttgaaatgatgcggcagtccaacgaactctccgtggcaaccgccgcgaagcgccgccgctcgacatcctccaactcgcacgagcatgctgtcttcgatcaggagatggagctcgacgacggggatggcgacgcctgggccgcggacggcatggataccgaagaaccagaggtcgtggcgcagttcaaccagctcctcacagaggcagtacagtatggccagcagctgcgtgctgattaccccaccgacgagaacggcggcgataagaagctgctggatgatattttctcgctagtggcgtatcctgatccgaagagatctgttcatggccattacctcgattctgaggggcgggttgctgtggccgaggagttgaattcggctattcttggtatgttgcttcacctatttattctgctgcgttgtctctgcttcctacttgcaagcaaaaatgctaacacagcactgtatagtctcattgggcaaatcatctgcagcagcgctggaaaggctataccagcagactgaagtgctggttaatgagatcagtgaagacggcggcgctggggcgttcattaatgttcgggatgacattttgctttgactggcgctgggttagcatcttgttgtcctttccttctttttttttcttcttcattgatgttcctttgtgtggacgggcctaccgatctcatatatcagttttggcttcatgttcatgttgatttacttctactttcacgactctctattttttccactttccttttgtcagattaacttctacgtatctcttagccagaatgatgagtccgcttgggattaattttgaaagttcaatgacctacctaggtactgggtactggtagcattgtatacaattctttgtgacgtcaagttcattctatacctagaggcggtgaggtccggcaatataaaagcggtaaggcctcgcgacctcgcgaacgctggggcttatctcatcccggctaaatttgggtatccatcgatctccgcctcctcgaattaaagggactcgataatacggagtagtctgtgatacctcgaacctacaaaatcttctgatgatcagtcctctccacacactcagctccccaaaggggccacattcttgacatggatccacataactatgaggatctcagcattcctactcattcacgcgcctccaccaccctacgctgctgctgcggccacaatgattgtgctttgctcgagcataacaatgtagctcttgaggggttggagaaagacctcgcgactgctgctaggctaggtcaggtacgtctctttgtcgaattagttgcccaaatcatgtgggtatgacaacacgccaagctgtttggaggctggctgaaccatgcatgttcgatttgatacatcagcttatcctcattcctcgcggaacactctgtatctcattacttctgttctcctttacttcttcatttcaactactcggactgcacattctgcataccttgtgcacaccccacatgatttggaatcaaatggccacccttggatcacaatctcccattctctcttactgtgttggcgtccgtcatggccacctttcatgattatactgtcaaggcagaatgtttggagccatcatcactgacttttgccctacaggccttgctccaccgtcatgaaagctatatggctgaagcggaagaggatcgtcatcgtttggtcggcagcattgaggatctagaacgtgaaaagcaacaagttcaagcagaaaatgcgcgcatcatcgaagagaatcgcagtttattagagcaacttgacagtctgaatcaagcggtcaccgagtctgacaaccatgtgaagtccctaacagttactttggagaaaaccgagtcagatttgcgaagattgacagtggctgcaacgcgggccgtagagctcgaggcgcaactagctctcatggagacggagcagtctaagctccaagaaagtcttatgtcggtgcaggaagacgagaaatcggccgtccaacggtggagaaaagcagagagcacgctgcgagaccttcacgatcaagtcgaccgtatcgagagagaggcacgcgaggagagggatcgacatactgagctcgtccaacgcatggaacgtaagagggatgtggagcgcgagctagacaatgcagcgggacgtctcaagggtgccgccgcagcctccgaactcaaccgcaatgcaggtggtacaaacgttgtctctcgtttcgttaaggacatattgcaagacaacgccaatctgcaggttgggattatggagctacgcgacatgcttcaaagctcgaatgaagaagtgcaaaatctacgggaacaggttatctctcatcagcccctggccggcgtcgatggtgacaatacacagccaaggcctcctcccatcacgctgagcgaggagctacgagcgaaggaagaacgacgcgtctctcaggaattgcacatccatcatcatttccacacaccaactccagccccaactacgaagaaggaaaaaagcacgctcaaccgtcgcgtgaagaaacgccgcgccgctatgggaagcccggcagtgctgcattctgcgacgcgggccaactcgcctcgaagagccattcatcgctcccagtcatctgggtcctctatgtcaaccattctatcgcaaacctctgtctccatcccaccctattcatcctcccgccgctggtcctcaaactcgcgtgctggggattcgctggcaagctctcctcggtccacgttccggacgtcatcgatatttgatcgtgttgaacgtggccctgatttctcacagtctaccagccctgatagcaccgtgttctcttcccctttgatgcagacacggaacctgaagggtcttgatatgccataccgcccagtcggtggctttgataatcacgatgcacccgacgatctatctgcatttgataatgatttctacagtcgccaagacttctttaacacgggggataatctcataagagagccggctatccccgaggagtccgaaccatctccaccaatgtcatacttctcgcctatgggtgaaccactgacgaccactgatgaaatttttactatgcatgtacagccatcttccttgcgcagatcttcttcccatgacagcttgctctccatctccgttgctgggatggacattcatacacccacaagtcgccacaagcgaatgggagactggcatcccggcatgcggatccctcggcgcattttgtcacccagtgtcgaactagtgttaacacccccggtaatctcaactccggccgtcacagccgatcgtgcaaagagctcagagtatacatcccagtcattgcttgcttccatggctgcgggaaacagcacgaagtccgacacggcatccgttgtatccaccgacagcaccagcacccactcaaccgcacttcatgggcccgacaaagttaagttcggtcgccgcgtgggaggctgggtcctaggccgttggggcatggcaccggtctcatctgagagtgactcgcaagatccgacagactcatcgaacacgtctgtgacatcgtcttctgcgtttgagcccaaacctcgtgacccgctagctcaccgcttcagattcccaggtgtgaatcagaagggcccgataatgggcttgcgccctccacctgctgctccaatctctattcatgcagaaagcatagacgagaatctgctgcgagagagtctagctgaagagaatagctagattcctcgcggtctaaatatctgcacatccattgttttttagcgtttacactcgttttaatcttgcatttacttttcttttgtttacttgtgcatcctcgttcggttgttgcatttcttggattcctggtttgggatggcgcgagttgcgatgatacccatgctttcgtctttggtttcctagaattatctatattatacgatgtacactctttggtcattttcacaatgtgtattttgcaacaggatcctgtagcttagagtggtttttctcggtgtcttttatgcttatttttgaaggattttgataggggactgatatatacacttcgtcgagtgcctcgagacagttggagttttattcgtcaagataatcaacttgaacagtttcgcatggagttcccttggagctggttatatactgtgacaacaagtttcatgcaataactaacttttgaatgatttgcatgatatcaccttccctattcatactcatggcctcgtgatgtaaactcagttcaagttgcttatttcgaccgcgaaatccgatatgtccggagcgggatgctggtcgaatggaagaaacccgtctggtcttctgctggtgtcgattcgaatgggagggcctcaaaagcgagtgagttggtttctgttgatgtttagttgcgtaaggcatgaccatcaacgtccatgtatgaacttcaagactcaccacaggcatttagaaacgtgcggaaagtattttcattgcgcaggctaaccgcagtgatgaattcttcaatgttatagttctcaaaaagatcctgcacagtagacaggagtgagggaacaaggtcggtatcataaacctaggtatgtaagcaaaaaaacctaagtgaacagctcataaagacactcactagatcagcaccgagagcaacatcgaacttcagccctgtcccttcctcaccctcatcagagcccaacccagcaagatcccccaccttctccagcggagttccccactcccagacagcaggataaataggaatggattcacgcccatgcaaattatgcttgacacaagcacgaatattatcaacaagtgcgggctcacgatcagtagcaacaatagagcgcacaccaagatggcgtgcacaaagaaacgacaagaatcccgtgccagctcccagttcgataacgcgtttaccgcgcacaagagcctcgcccgcctcagacgccaggaacgaaccgaggtgcagagcagcctcccatgtccggttacctgtagttccagcgtacagaatcacgccgcgcgattcagaggtcgtgacggtacgcttgggacaatttcccgcgctggatgttggcgctgtgtacttgactaacgacagctgctgcgcttgctgcagggctgaaggtttcggctgtgagactagtgtgctccagctttccatgagatcatcgttgatctcctgtatttgggggagatcagaggttagataggtggaatcaaggaatataaaagtgggttttggttttgtattggtgtgaggtggatgtatatgggatagcaaaggaaaagataggaagttcaaaatgcaaaatagcataatacaaacaggtggacaggcatacatcctcctcggggttgataattgattcctcgatgcgtgatataagctgtttcagcactcggcttcggtatctgtccggtgggacggggaagactgcattttcgttgaacatgcgctcgtatagagctgtttgcacagctggctgaatcagcacagggcctggtgggaggtccagttgctggagctcaaccagctggaagtattgcgccgctaatttatcaatagagtcggtcatgacggtcggatgaagactaatgaatgaatttgataccataggagatcgatattattggagcccggggaggagagtggatgagtcaggaatgagataagcaagggctgatcaatacattatgcctcaggcagaaaccgaattagtcatatacgcctgaggcaaatagctcaaacaggctagcgtctaccctagccgagcccacaccacacgaaaattgaaagttcgacatccccagtgaccccgtcgacacttcctccatccaacgcacacaccaaaatggccgactctcccgtcactctgcggactcgcaagttcatccgcaaccctctgcttgcccgcaagcagatggtcgtgtaagaacccccctgattttccccctcgtattggatctgtgtgtgggaaatgcatcgcaggcgcgcaatatggaaattcgacaaccacccagcacaagagaaagagaaagagaaatacaatcggaccgccgcaacacacacagaatcaagcatcgaaaacccaaaagccagaaaaccccgatctgacatcttttcgcgaatatctagggacgtcctccaccccaaccgccccaacgtctccaaggacgagctccgtgagaagctggccgatctgtacaagtccaacaaggaccaggtctccgtcttcggtttccgcacacagtacggtggtggcaagagcaccggcttcgctctggtctacgactcctccgaggccctcaagaagttcgagcctcactaccgtctcgtccgtatcggtgccgccaacaagatcgagaaggcttcccgccagcagcgtatgtctttctcttcgtctctgcgattatcaatcgcaaactatgatggcatgtgcatttttgctaacctcctcctacaggcaagcaacggaagaaccgttccaagaagttccgcggtatcgccaaggtcaagggccccaagaagagcaaggattaaacgcctcatctgtaactattcgcacgattcaacatggaccgatgatgcggcatggcgcgatgggaaagattatggcggtggcggctttggctctggagtttcccacctggttatggcttgtctggacccaggtgcggtcggtcgtgtgtggggggagtggtttatcttccttttcagcgaacatcagactaaaacccaaaatgatgcccgttgaatggtgaagatcgtggatactcttttttcttcctgtgcttgttggagctggtgattcccgagaaaaaaaaaaggcctgacgatccccatggaaatctaaaacagggcgtcagtgttgtggttctctgtttgtatgttttttggggaggggatcatcagtcttcgtgaagacggccagggttatgagaatccgggcttcggctgtttgcccgggatgaaattacattttacttgtttctcttcactcggtctggcggtcttgtagactggacttgtatacggggccatgatgtctagatctagtgtagttggatttccagactgtaaagtgaagaacctctgccgtgtagtcgaggcttggtctatatcaagccatgccctccacgttatatgcttcaaatgcggagtacatacttgacacaacggacggttgatatggtaacagttaaccaccttcttgcctacatcaatgaatgccactactatatcaatactaaaaccaaaaagagtgaaataatcatggcagccccttggccaaaagcccaatctaattcctcaagaaccaaatttcccagtaagcattctaatcaaatttcgttatttcggagataaaatctgggaaaatactccgccaaagcattagttaggttacataggcaacttgaaagttattgtccgaggcgctaaagccctaattcagagcgaagtctcacactataacagcgaaattgcatctgatcattgcctggacaatccaacacttgtgattaattgtgattatagtcatggcactaactaactagctaggtatttatcccatccagatatatttcgtaagaaaaagacgtacctagttactagttagaagagaaccagtctttctatccgactcaaaaaaaagagttaaaaagccatacatacaatgcaggaacaaacttcctaaaccaaaccatcacatctagcaatgacaaggcctcgaagcaacacaaaccagccggcgggaggctgtgtaagtatatccctcgggttagatcgcttgtacgatgggacagattacacaacctagaacgaattccctttcctgaaatattcccatttagatttcatttcccatatggaaataccacttattaattccacgtggacttgtttcgtccgggatactagtcgtctgactcgatatgtagatacgcatctgctaccgtaggatttccgagccaaggacccagacacgtccatgtcagggttgtatacggcattctgggttggatcattgtatcactgcatccaagccaagggcggaagtcaggagtccgtcgatgtacagatttatgtgctattttctggttaagaaggatctcggagggcacatgggcacatggatagccctagcccgtgcttgtgactgttgaggatgggggacacatggggatggggttaattataagtactgctttatcaggggatctgattgtattaggtgctaggttgagatataaatacttgagtaagttgtaaaagacattactttcgaatagaccgtagaaggcaaataaggaacacgcttggaaggattgctagaagacagaagactagaatcaacaagctctcccaagtcattcgtctggttgaaacacatatcacgggcagtggagagtttctcatagtaacaatagaaagtcatttcacgaaagactaaacacacatggcatgaaaacaaaagcatatttttgcaacagaaactgatccacagatatgaacactgcataaagccactcggtggtattagggagtaatcttgatgggtgtgacaggatggatatctcatcataatcccccattggatgttttttttcttcttttggatgaacacaggcaaaataaaaaaagaggacagaacgagcaataaaccaaaataggacagaaacatatttcataaacagacgcgagaaagacattaagtgtgggcggaaaaaaggcagatgtaaacggccttgatatgggtatctcttttgtgtatcttgtgggaaagaaagaaacgaccaagagaccgaccaggaaagagaataggaagcagcgaagaccaaagaataaacaatcaaagcccaagaattcgatgggcaagtataacagcgatacaatgacactaatgacatattgaactcaactcaatatgctccctgatgtcccagcggtggaacaggagaacgatggagactatcaagcgatcgcccataatcagacaaatcttcagctaaaaaatcacagggcagaccaaccgtcgagtccacatgtcgaacgcggttgtatggcaaaccattaacaagcgtcggccccgagcagcacacctcggtctcggcaaccctcgacttcctgcgatcaccgcccacatacccatacacatcggggctgcaattggaattcatcacgacaagacgacgtcctaagccgctatcacgggagaaattgcgtcccatacgtggatcggacgtgttgtactcgcccacgagagttccctctatcatttccagggccgggtaaggggggtttgcagcggagggggccatggagcatggggctaaaggaataggggagtggccgtccgcagttgacatggggacgtatccgaagaggtcgggtgttcccgcgtctgagtcgcttgacttaatgcgtgttggggggttaacgttgtagacaccgtttcctgggatggtgtgcattggtactgtgcggccgtctggggagggtgcgtaccgcgagttccagctctttacgtctgaggctagggtcatacctgagaggccatctggcagggttgagaggttgatgtttggctgcagctggggttggcttcggcaggttgggggtgttgggagggtgcggtctacggcatccgtgtaggacactgtcaatgcccctgttgattggggcatgtcgggggatatgtcttggcctgagaggacgaagccatatgcagcatggttgctttgttcttcgaagaactcgccgttgggtctaccattgagatcccaggcgcggttgctccatgccgcggtgccatagtcgagcattgctcccgaaacgctaggcataatgtacccgtgcgatgtctggccatggtagtgggctgactgattgtcataaacgtggtccatgccgacgtgttgccgggagaagttggagtggatatccagctcgtattcttctcgctggtatggaacccgaatttgaggggagcccatgaggattgaccttcccccacccttggttccataaaatctagctgcttctctagcagcgtcttcgggggccaaagagttgacctatcaaaagaaaaccaggtcagtgtgactctttcgctgtagatattgtggactcaagactcactcgtatgtactggcattcggtagctccaacactacggcagctggagcaggcaagcccattgttgaggtcaccgttgcacttgatctttcgctttcggcatcgattgcactagtggaggagggttagaagtggccgggtgatcaagatggagagaacacttactgccactagggctcgctttctctgtttccgtggcttttcctctcgctctacgagagtactgcgctcctgtttggccacacgcattgaccgagccatggaaatggtcgagttgcgtcggacttggtctagtccgggcatgtggtcgtatgtgtgatccattgatatagcaaagaacaataacccgttcgctgctcagcagagtagagaagattcaaaggaaaagggcactgcgaatgcctataagtgtttatgaaaagaagaaatagaaaagtagagaatgaaggatgtctctgggaaatagggctagatttaagccatgttttggtaacaatcggtgtgattgattgccttccttttttttcataatatcgacatgatgcgatatttttgccccctgcctttttctctatctatgttttattattattctatatatgctggctgtgtgtttagatccatttgggtagagcgaagacatacaaagtacataggccaaaagtaccctggacctggtgtcttttcttttctttttccttttcttattccttatttctcactttttatttctcttattttaccatctcgtatctctattctattattctatttttttctaaggggaaaatgatatgcaaagttccgcttgcccagatttcccccagctacccccatatatgaaagacagaaaatgtccccggcgttttaaaaagaggtttcacaaggtaacgtcacacggacatgaccagacatgacgagaacaaagtgctccggtaggtagtgtttcagccaatttgaaggcttctttcttttcttttttttcgtcatgtctggaagaggaagtagtaagatcctcaaacttggtgtatctcatcttccaagagatagagaaaacgggcaactgccgagctactgtttgcagatactgcgggggagaatgtcccgacgtcccgtggaaaatgtttgctcgatagttctgtatagctgcaggtcaaaatagcccgttctgaactcggacatcgtcgaggtctggaacatatacctagtcttgctatcttgcaaacgcacgtcctagagaaataaataaaaaataatatcaaaaggagaacaaacgcctgtcttaggatgctccaaatgtctcaatagagaaagagaagagggggaaaaagaaaatataggcaaaatctctctcatgacacctgtcaactttgacaagcgcacgagttggccccgagccaagcgcgctctagaaaagtccagggatcaacgatcgaaaacgctgatcggcgacatggggggcgattcagcgttctttagcgcttccggcacgcagctagatcgaaatggaaggggggaaaaaagcaaatcaggcccataaaatgagaatagtccgctgtacttacccagtgtatgtaagtacgcttgtgttatccataccagatcttgatcatgatcgacgctaaagctaaagactaaaaggggatctagaagtactgaaatgcatgaacatctaggacacttgcaaggttcgcacattgctacttggagctgatgtggagagaaatgggtatgacatggggcagataattagaaggggtttctccaagattagtatagtaaaccctagttctaactcgtccaccttgagacattcggtgacaggacacgacaagagacatagagaaagagaaagagaaaccaaaaacagtggggaaggcaatcaaagtctgggtttcaaatacaaatctagacctggagtctccagcaggtgtttagacaagttccggcagttcaaggtttgacgatgcacgacatccggggggaagtaggaattgcgaagagttaggagaaacaagccctagctacgccagctgactctaagtcggctcgccaggaacatatgttgggattgagactggcttttgttgcagacgatacggtggaggcaacccctggctgctgaccgtagctgcctagatcgagagagggcaagtggctgggctgggtaagcggctgattcacgattgatcatatcctaccccacgtgtgtgcttcgttcccagaagttgatgtatggtcatagtgatgatacccgttggatcatgatgcaggaggccgcccgtttccccttcccaccgtttctgctgtggaacggctcacgggggaagctggtgctgtcctagtaataggaggaccgtgtacttcctgtggaagctgcgagacggtgccatgatcttagtggggaaagagatacataaaagacaagacagcacaacagggtgtggcttggtcttcccaggatttggccagtgacaagtcagttacttgccaagaagagatgcttcttttggttgggcctgctggtgcatgagggatataagcacgcaaacagttcaaacctagaatctcagaatcccagggtcgatcaaggcccttaataagatccgctgcacgtcgatctcaaaagcgtaaggttatatccattatggcccaacgcggacattcggaagatatgccgctcgattgacaagcatcgtttcacaagtctcccgggtcgatcatccggagagccctagagctgttgcgcagcacgcacccgtcggtagattcgtgcaagaatccttttattggaaaaatcgggagagaagagaaaagcaaagaaaagacaacactgcaagaggctcagttccctccggttggggatccccgcgggcggtgattggtcgaagctccgacgatcttctctcgtgcatttcgcatttctcgggcttttacattctctccctacacctcttcatacctctctcatttcgaaattagtttgccctccaaggttctcgtccaagcgcctaattcggtatcttacacccgattccccgccatgagcgcgctcttagagacctccctaggcgacattgtaattgacctgttggtcgatgatgcacccaaggcgtgtgacaagtgagtggctccattccttggctttcccagtctgctgaacctgaaactaagctcattttgtgtgcttttagcttcttgaagctatgcaagctcaagtactacaatttctcgcccatccatagcgtccaaaagaacttcaccttccagaccggcgacccgctcggccctgatgcacctgagagtgatggaggatcttcggtttggggtctgctggatggaccgtcgaaaagaacatttccgctccaggcgtcgcgcacgttgaaacacttggagcgcggcacggtgagtatggcgacggtaccggcgaagaacgaccccgaccaacggctagccgccagtcaattcatcattacacttggagacaatctagattatttagatggcaaggccgtgattttcggcaaggtcgtcgagggcttcgatgtcctagagaaaatcaatgagtccttcattgacgaccgaggtcgaccgctgaaggatattcgcatccgtcacaccactgtgcttgatgatccctttgatgacccaccgaatctagttgaaccacctgaaagcccggtgccctccaaggcccaattagccacggtcaggatcgcggacgatgaggacttggatgatgatatggatgaagaggctatggacaagctgcgtcgcgagcgtgaggctcgcgcgcaggcgctgacattggaaatggtgggagacttgccgttcgccgacgtcaagccgccagagaatattctttttgtctgcaagcttaacccggtcacacaaggtttgtcgcattcccacacggaaccgtgaaattatgctaaccgatgctagatgaggatctgaatcttattttcagccgctttggaactatattgtcttgcgaggtcattcgggacaagcgcactggtgacagtctacaatatgcctttattgaattcgaggaacagaaggcctgtgaacaggcctatttcaagatgcagggtgtattgattgatgatcaccggatacatgtggatttctcacagagtgtaagtgcacctcatcaccgctcatctcctccgaccaatatgctaatacatcccaggtatccaagttatccgaaagctggcgcaattccaccgtcaccaagcgccgacagagaggtggatttggtggtgttgccgaccttgaagcgaaacgacaataccgagagctagacgaggcgcccatagatgaggatgatgctagatatctgtttgacaaacgaaacaagaacaggggcgctccagctccgccccgcgaggctccgtcagaccgcactcgcggtcgtcgagatcgagggagtcgaagtccccgtcgtgaacaggatcgataccgtcgtcgatcctatagtcggagtccacagagggattcacgaagagattcacgaaaagaacgaagctacaatcatcgtggacgatagtagtcaaatatcccctattcaaataaacacaacttgcaccatacggagtacatatccactcaacttcgcccctgtaagccaaggccccgcttcagctagcctattaatttccagtgggcaggtctcactcggcgctcgctagcgactttcttgtatgggtagctcgttaatatttgcccttgtagatccctaaaaataaactggagcccactagacctcctaatagtctgggatatattattagcaaactggagtgtacggaggttcactaaaggtacttaatcagcttgagcttcaccccacgttttctaatttttagttacttttctccttccttctcttcctcattctcctcccaatttattctacttctctcaatctcaaaatatcctccaaaatggcaggcgtaatcaaagatgctatcaacaatgttcttggacacttccatggcaccactccagaggttccccgtgaaccctccgcggaagagttccaagcactacaaaagaaatacacagacgctggacaagggcatgtcttcacttttgtcgacgaattgacccccgtcgagaaatcacagctcttccaccagctgtccaactttgatcccgctcggatcaacgagctggccgacaaggccctcaaccctcctcctgccgagcagggaaccgtgaccctcgagcccctccccgaagtcgccacagcctccatcctcgactccgacccctcagatattcagcaatggtatgaagccggcctgaaggaggtggcagcgaacaaggtggccgtggtcttgatggctggtgggcagggtacccggctcggcagttctgcccccaagggctgcttcgatattggtttgctgagccagaagtccctattccagctgcaggctcagcgtattctcaagctgcagtctctcatcggcggtcaggatgtcgtcatcccttggtacattatgaccagtggtcctacacgcaaacccacagaggagttcttcgagaagaacaactacttcggtctcgacaagagcaatgttatgatcttcgagcagggtgttctgccttgtatctccaatgatggcaagattctgctcgagaccaagggcaaggtacgtagtatacaggcatagctcaaacgcgtgtaggaaatttgttgaccctgaaaataggccgctgtggctcctgatggaaacggtggaatctaccaggccctagtggtctccggtgtgcgggaggacatgcgccgtcgtggcatcgagcacatccacctctacggagtggacaactgccttgtcaaagtagctgacccagtattcattggctttgcagcctccaagaacgtcgacatcgcgaccaaggtggtgcgcaagcgcaatgctaccgagtccgtgggcctgatcctgttgaagaacggcaagcccgacgtggtcgagtactctgagattgacaaggagactgccgaggccaaggaccccaagcagcccgacgtcctcaagtaccgtgccgccaacattgtcaaccactactactccttccggttcctcgagtcgatcgagaactgggcgcatcagctgccccaccacgtggcacgcaagaagattgcctgtgtcgataccgcgactggtgacattgtcaagcctgagaagcctaacggcatcaagctggagcagttcgtctttgatgtgttccccatgacaccgctggataagtttgcctgccttgaggtgcaccgtcacgacgagttctcgcctttgaagaacgctcgtggtactggtgaggacgaccctgataccagccgcgcggatatcatggcccaaggccagcggtgggttgaggctgctggtgctattgtcattaccgatggcgaggccgttggtgttgaagtctctcctctgatcagctacgtatgtctctttttctctatatcatttccctggtcacaactaacatacattacagggcggcgagaacctggaattcctcaagggacgggaaattaaggcaccggctatcctggagcgggaagagtagatcagatgggatctaaccagtcggatctcgcggagatctcttttggaacgaagaaatgaattgcattgtgacactttttggagaatggatctactgaaagaatgtagggtaaggaattcgtagagtattcagagtactagtgttcaatatgagtagaacatagaggaggagatagaataccccgtacctacatacactagactgtgtatagaacgcctggagtagcaaagcgacgccttacgcaatacggaaaagcccgggagctaaagccgtttgacgagtttgtcctttttccacttttcctctcttctttgtgtgcattctcttatttaaaagaagttggagctgttgagagaggttattgaagttgttgagagtgtgagtttcttctatttcgtctttctgtctatttcttggctttttcttttctgtgtggttccctcgtgtcccacttttttttttcctcgagtgggctgtcagaacgtgcttgcttttctccaagggttctcaaaaagctgacaaaaagtgaccatttagatttttaccaggatttgaagagttaccgtgagggtgagtgagatctgagggtgtttattcgttcgccgagctcgtgctctcccccgccgatctacgtcttcccctctttcgcctgaaatttttgggattggcacgttatgcgattttgctggactcggacaacgtcggatataatatgcactggaattggagtccaaacaaggctcgacaacgcatgatggccagacaattcgactaccccggcaatgcaggggaagacgctgcttatcgacggagctataccaaaccataaacccggcaccgggctgacttgcgatggatagattaccgccagaatgatgttgtctcgtcgcgcatgctacaagtgtggcaccattggccactacgctggttagtatagctggagtgctatatctgggatcaaactaattcctcggtagaggtctgctcttccaccgagcgtctctgctataactgtgcgtgaatatctccccgagaggtcataaccttatcttacttggcgctaatttgttttatctcataggcaagcagcccggtatgttcaaccatgagtcataatactcaaaacaagcttctaagtcttcatataggccacgagtcgagcgcctgccctctgccccgtaccaccgagagtaagcgatcactcaatatcaactgtgctgccatcgcaggttgctaacaccatctagccaagcagtgctataactgccagggcctcggtcacgtccaggctgactgccctaccctgcgcctgaatggtggtgccaacagccgctgctacaactgcagccagcccggccaccttgccgtaagtttcatcccctaagcccaggtctgcaacctttgaggcggttactaactctactccagcgcaactgccccaaccccactgctcccggagctggtgctccccctaccggtcccgccgctggccgcggtgccggtggtgctcgtggcggtttccagggtggattccgcggtggattcagtggctacccccgcgccgcaacctgctacaagtgcggtggtcccaaccacttcgcacgtgactgccaggctcaggccatgaagtgctacgcctgcggcaagctcggccacatctcgcgtgactgcaccgcgcccaacggtggtcccctcagctccgccggtaaggtctgctacaagtgcgcccaggccggccacatctcccgcgactgccctaccaacgagggtgccgctgctcctctcgctgccgttgaggttacacccgttgctgctacccccgttgtggctgcccctgctgtggtcgctgttgagactgtcactgaggctaacgtccctactgcggctcctactactgcagtcgcttaagtgtgttcggtcctatctctccaccgtgcatttgctattgaagcaatgcctggagttccttttcttccttgattctgtactacggtcactttccctacacctcgatcggtcctttctctccgccttttcttcctttgcatatatttaaatcacaccccttgttttgggaacgaggtctggttctggaccttaaaaaacaacagcttttgatttccttttttcacccccttttggacgtttggaactcgttctttttttacttatttttttttatcaccctatcatgtatacgacgaacaaacagaaaaggttgtttttgtttttcgcgaagccctcgacttgatttctcaagtcttaacgattggcgtctgttgtctattctcatggattatctttcttggttttcgattgactcttggttgtggttttcccgaatggggccaaggagagaacgaggagatgaagtgtggcaatgagaggatatgttgaagctgaggggaattggattcggagaccgttgcaactggaaagaaagagagcttccagatgagaagagtcctgagaatatttcgagaaaaaaaaaggaaatgtctcaatcaccttgttcttgtagtgtatagatgtagtgcgctctgtgcttagtagctgtctaaacccgtgaccttgatcacccaggtcgagtcttttacacctcttgttcactctacaatctaccccatcagtcagcttcagatagccatccccaattgatccacatcaagatgccgggctcggttggaagtgatgaattcgacgatgacgaggtacagtaatcctcatacccacgcacgtcctagagctgccatctaaccaataaatgatctacaattgcaggccttcattctggacatcgacggcatccaggcccacggcattggcgcagccgacattaccaagctgaaggccaatggattctacactgttgctgtcagtcctcatcttcgcatagttcaagccaattccatccccaaacctaaccactcatccagtccgtccacggcgccacccgcaaaaccctcctaaagatcaaaggattcagtgaagtcaaggtcgagaaagtcaaagaagcaattcagaaatgcctccccacggcctcgggtttcatcacagcaatggaactccatcaccagcgcaagaaagtggtccgtatctcaaccggcagcaaacaattcgattcaatcctcaacgggtgagtgcaataccaatgcccctgtcaaactccatctaacccaatctaaccccaccagtggcttccaaagcatgagcatcagcgaagtcttcggcgaattccgctgcggcaaaacgcaactctcgcatacgatgtccgtaatcgcccaactacccaaggaagcaggcggggcctccggtagagtcgcctacattgacacagagggcacgttccgacctgagcgtattgcccaaatcgcagagcgattcggaatggaccccgacacggcgcaggagaatatttcctatgcgcgcgcgctgaacagcgagcaccaactcgagctgctgaacacgctttctcaggcgtttgcgggtggcgagtatcggttgcttgttatcgatagtatcatgaactgttttcgggttgattattgtgggcgtggagagttggcggatcggcagcagaagttgaatcagtttttgatgaagctggcgcatatggctgaaggtgggttgttttatatgtgtctttgctcttttggctgctttgctgattggtctgacttgcagagttcaatgtttgtgtcttgatggtgagtgcgatattttgtttctcgaggtcttgtggctcacgcttcagttcagacaaaccaagtccagagtgaccctggcgctagtgctctctttgctggagctgatggtcgcaagcccgttggtggacatgttcttgctcatgcttccactactcgtgtgctccttcggaagggtcgtggtgaagagcgagttgcgaagatccaggattctcctggtgagtacttcgatatagtccgggtgctaccactgttctaactttttctaagactgcgctgagcgtgaagcaatctatatcattaccaatggtgggatcaatgatcctgacaaggcttgagggtagggtcgagacgatgtatcgatgttgagggaaatgctctgcagtcacgattttcatgagatttcgtgatatctcaggttttattctgtggtgattttataccattaatcaatttataccatagagaataggttagaataccaactccaagttatgttcatgtcgatgtagttgaagccctaactaagaaattcaccgcctacaccgccgctctgacatcccggcaaaattctgtgccaagagcaaatctgcagaaaaagttcagctcaatcaacgcaacaatccagcgtcaaacctccattcaaaatgaagggcgaatccgtgcaggtagaagggtataccaccctacctgtgcagctcccaacaacccccctcttcccctatcctgcaacacactatctctacatccgaccacacgaaccccgaatcccagacccagattccacccgctccctcttcatcgtcaacgtcccaatcgacaccacagaagtccaccttcgacacctcttcggtgcgcaactcgccgcaggccgcgttgaaaaagtccaattcgaagatgtgcagaccaaaaagcgcacagcggtaacaaccacagaaaccaacctaactcaaaccaaaaagaagcgcaagcgcgtaactgccgatgactttgaacgccacctagacgacatcacgctcccttcaacctgggatcgcaaacttcaaaagagcggcgcccacgcagtcgtcatcttcgccgacaagcccagcatggagaccagcctgaaagccgccacgaaggcggccaagcggggcaccaccatcatctggggcgacagcctgccgaccaaccgcatccctgtcctcgggctaaaccggtacatcgcgcacgagcggatgcagtaccctgatcgggggacgctgctgcgggcggtgaatgagttcatgaccacgttcactcaggtgtctgaggtgcgcaagcgcgaggatcacaagcgtcttgctgtgccggacgaggatggattcgttactgtttcgcacgggccgaagttgaattctgcggcgagggaggaggagatgaaagagcttgttgagaagcagaagaagaaggctgagggactcgaggacttttatcggttccagtccagggagaagaggaaggagagacagaaccagttgcttaggcgctttgacgaggataagaagaagttggcggagattaaggcccggaaggggaagattcgagtaagttttctcttctttgttcacttgctccttggtccttgaggttttactgactttttatacagcctgagtaatctgttacatgatagcatggcgttatgggtgtcttttttcgctggcaagctaaaaggttcgagaggtgtcctatgtacatgtgagtttttaccttttctttgccttcttttatgctcgctcctatgatgaactcgctggggccatagtagcgaaacgcgtttgcccgctgttatgccatgactgcaaacaccagcatatctatatcttctcgccttctgaactggaatttcgtcttaccgggatttattgtgcttcttggtgtcgcatctgctaattgtgattcgaaacaggttcgatacatacatacctgttaccccaatatcaatagttcatgacccaattatatatgttcgagttttcgtatcatccatagccaactcgtagatgtctctaattccggatctcccgcacagaccaacgcttggcgttacatcccacctctgggaaacaggacgtcttatgggattgatagctctgccaaagtatagaactgtttaaaaacatcggagaataatggctacagtcagctgtattatttgatactactttcggcaaagtcacgttctccaagcctgtggcaaaagcttcacacgatatatcccgcatgatatatccagcaaaaatagctctatctcagtggcatacagcacctcatcggccattcttcgctcttttttcataaaacccccatcaagagtgagaatcttaatcattgaatctggcacattctatctatatcgaaagaaagccacaagatgtcccctgcctcagtcaaaaatgagcaagacagcgactccgactccgacgtcgagttcgaggatgtcccaatctccctcccaaacagacccagaaacagagaagacagaggaatcccgataaccatccccgcaaccccgcaaccacaatggactccaaccctatcactcccgccacagcgaagccaacccatcccctcgggctccgaggaagaagtccagctccgaggccacatcagcaccggcatagagagagtcacgtaccgcaaaatgaaatccgacatgggtatggacgcaccgggtacgcccgcctcagaacgcaggtataatggcttcaaagagctcgctgcagatgtggagggtcttattgatgcgctttgggcgtcggcaacacgtgagttttatatcttatacaacgtagaagtggattatattgttttatactatctttattgccttcctttttgacaccatctgctacattctaaccaattctgcccagcggcaatccaaaccgaagccctcataaccctagcaggcctaacccaaacctccctcccagccttccccttcgatgccccaccgactctaaacatcctatacaagctcgattccgtcttcgcagcactatgtacaggcacacacccactcaccggcgccgttctaccaggtgcacagctgggccactctctcgtgaccgagacgcagaaggttcggatccggagtttggcggagaggactagatatgaagtgttctcttgtttggagaagtcgaaagatggagttaatgctggtactgttaatactggcgggtatggatatggggatgacgaggacgaggatagtggcgacgaggtcgagccgtggatgttagaggccacgcgggtttatgagaagagtcttatgttgcttgcggagcaggatcccgaggtggacgcggggatggatgagttcaactgtttgtaatgtatattcaatcttgttgcctgatctaggtgtgcctatgcggctccaacattaaatagatgttggtgaagatgatatttttagaatggatctcttgccattacgtcggtgtacatatggtgcatacgaggcagacgctcaggccacacacaaaatagtgaccaagtagttcggagcacgtcccacaccaatttgcattacatacggcctctattgtcctaacattactacctatggacgcggatatttctagaaacttctagctaatgaaagaaaaaaatctgcaccgaaaaataaaaaacaaagagcctgtggggtccaggcaaaaaagtcggtcgattttattcactatacaaatgccgattggatcggtaatgaagtaatgaggtttacagtaagagttcccgtacctcgaattcaggtatcagtcacacccagtgttagcactctctttggccagaacagagcgaactaagtggatgtgagccctgaaagtgggggtcattggggccagctagtggcctgggtctgtgtagctcggggctgcaatggccagtagtaagtccgagaggctatagtttagatgtacatcgtgaatatacgatttcgttggctgtgctttgacctggccttttttgccacgtgaaagcgaagaaagtggtaactgtgtcatgacagaggggatataccaatagttgtatgtgcatatgctttggatgatatttccgatggtgggaacgagctgctttgtttccatggttcatactgtatattcaggtataatatgagattgtgttactgaactgagctataactagatatatattgtgggatgatgttgtagctgcctatataggtcgtttgcttagggctatactattccgtacaacaagaccagtttgccgtgtcttaccatgcaagggttggattagcttattttcatagagctgagcaggtgaacggaggggttagatctgaaacctaacatcccaccttaatgaatatcatcccttgcacgcaaccccttccacagtataaaacatacaatagagtaacatggtcgaaaccatgtcagtagagcatggttatgggtaattcaatcttagaaacgcgtcgcgtaccgcgtagagtgaaataagccaagcagatgaaatctctgctggtaaagcagtaattccaatacgagcggccccccaatcctggccaataagagcagaactttgcatggaaagtctcccatggttctgatggagcctttttttttctttctttctctttgatgtcttttttcctggtcctgttctttcatgaccggacgtgcgcggctgaggtattttgggaatacgaaggggaggaaaccagattgggaagtccttgcgtgcagcttagggcagtacaggacatggattagagaaccttgcttcgagaagattggattgggggctctctgtgacctctggtagaccttcagctccagggctgcagacagggtatctgggtgaccttgctgtattgtggaaatggaattaccgtacggggctgctggttccatggttctgtggcgtttgttctcttccaaggtttgtcttgcttattatgatattacatacagtagatcgggtgtggacatgctactagacaccatcatgtctatatccatgaacaccttagtatagccctagttttgcatataatacaagagatcagatcaaaccactgcctatgctaagatgtacggagtacccaacaggttactacctgatctgcttgtactcttactcagcatatgacgatgacgagggctcgggagaggcccacacagacctgaggagttgacaagtcacattgcgagggcggcgacaggtccttgcagatttcatgcattggggcttccggccccttgttcttctggctttcaccgaattttgttcacatttcttttttttttttccctgtggctgatcatgcggacaggtggaagaggtcgatcatcggcaacgaactttggatgcagacctcgggtcccagggtatgatgtatcatcttcaattctcccgggcttcccgggattctggtacgatgaagaatagtaagccccccgcatgactgatatcatgcatttttgacaggaatctggggacaggctggtatatataagtattctgtacggcgtacggagtagggtttgtacctgcctcaggtcaagagaggaaagagctctgatcgacaaaggcaaggcattctgcactaccggctacagtgtacaactagtagatatcatactgttgatactgatctatacacgcagttggatactagactcgacctactctgtactatttagtatgttgttggcgacatacttcaactctggaacggaacataccaataccctgtaatacacttaccataccgagactcacgtaatgcgtttcccacttcccctctctcttcatctcgcgagatttccaattcttcattttcttcttttccccctcctaccttcccctcccttttcttattgttcgaagatctcggtttcaattttctgtttagttatcgggagttctgcttttcctcccttgttgccgattactctttttttgcctcgcgcatttccagtgttttcccaggttttcctcaacatctaggtaagttgcttggtgttattctatcgcatgtcgcatcttggccccaagcctctttcctcgtttgaatgtaccccaaattctgtctgccccatatctatcagcagtccggcgcagcgcagcgcaaattagccctagatcgcaagcttctttgcagggttcacgattttagtatggcgacgccttcgccttgaccagcgcttcgggacatttgagccgattatccaccggtcgcacgcatctcaacctcaaaaacgtcgccaatatgaggaatcggtccgatctggatgtctgacttgcccgaaaactgtgctggattgagagggtggacggtcgcattcggacatgaaaccgggacgacggaaacggccgacgcatgatgatcgcctagcacccgagtggaagcaagtccattttcgtctcgcgcatccgattttcgccgttggattgttcgtcttcggcgactcctcaaagctagcatcgtgagatgcgatgcttcccgaagcactagtcttggcgatttccggcaccactttttttgaggctcagaatcatatatacgcccgaggaaccagccgcaaaaatgctgactacgcacttttttttcccttccgcatcgtttactcacttgcattgcttggttgcctttctctgctattcacctctcacttccttttctttactcgcgcatatgcagatctgcttcaatttcattgaaaattgatataatctgactttatatcttccctagcttttcacgcccgtctctttgcttggcttcgttacgacttgatctcacgccggtctttctttaacgactccacgaagttctagtcgctcagacatcttatattcttacgtcgactttccggactttgatcttgcaaccatgtcttacaacggctacgaaaacttccctcagcaggatcccgccgctgctggcgccccggctcccgttgacaccaacatgaccggccaggccgatccctccgccgctcagttccagggcccccctcctggtgagcccaactccgctcccgtcccccagcagggtgccgatggcaagaccaccctctggatgggtgagctcgagccctggatcgacgagaacttcatccgcaacctttggttccagatgggtgagcaggtcaacgtcaagatgatccgtgacaagttctctgggtaagactgcaattagaactttcatcccaaaattgtttctaatgtgggtagtaggagcaatgccggatactgtttcgtcgacttcgcttcccctgccgccgctgctaaggctctttccctgaacggaacccccatgcctaacaccaaccgcgtcttcaagctcaactgggcgaccggtggcggccttgctgatcgcaggtaagcgatgatctctttggttggttgcctcccggctctaaaaaactgacccgtcccagccgtgatgaccgtggccccgagtactcgatcttcgttggcgacctcggccccgaggtgaacgaatacgtcctcgtctccctcttccagagccgcttcccctcttgcaagtctgccaagatcatgaccgaccctatcagcggcatgtcccgcggttacggcttcgttcgcttctccgatgagaacgaccagcagcgtgctcttaccgagatgcagggtgtctactgtggcaaccgccccatgcgtatctccaccgctacccccaagaacaagggtcctggtgtcggtggtaacggcggtgccgccatgggtatgcccggtcccgctggcatgtaccctcccatgggtggccctcccatgcccttctacggtgctccccagcctatgaatcagtttacagaccccaacaacaccaccgtcttcgtcggtggtctgtccggctacgttaccgaggatgagctccgttctttcttccagggcttcggagaaatcacctacgtcaagatcccccccggaaagggttgtggtttcgtccaattcgtgcagcgccacgccgctgagatggctatcaaccagatgcagggctaccccatcggcaactcccgcgtgcgtctgagctggggccgctcccagaacaactccggccccgccggcagcccctaccgccctgctcccccgccgcctcccatgtacccctccatgggcatgcccccaacccaccagtatggcgggtttgcccccatgaaggtgagcgatcaccctggcagcccgatcccggatcaaatgtgaagcaggcggtcggctgacacactcttccagtaagcgtttccctttgattgaaagcaccagcaggagttatttgtgtcattccaacgatgattctattgtgtcataacaaattcgttccttggtttctgggccaaggctatagctcttgatgagcatttgtctcctgtgctacgcatttcctttttacgtgagcgctattaccttagcaagatctgagctttatcccctttctgatctgtcttgttcttatgtatctttccttttttcaccctctcttcgactctccccctttgcgccccgtcgtattttatttttctttatcttattttcgatgtgtctctgcccttatgctatttatgctatctgggtttcccgccactgggtctttgtctgcgtgtaatggaagtccgaattgtcctgcgcttctttttcccttatactccttgggcaggcattctgcgaaaagttccatttcccccaccgttaccacttttaccaccttatttcatttgttcctttttttttctttttttttttcttttcttcaagcagctaaattgaattattgttcgctttgagaatcttcgcgtcgtgcttctttttacccttgtttcttgttaagactgattgccggcttgtacaacacgctttttttcgtgcgcctcagcgtttgtcgattctaaattcctttgatcgtatgcaataatgtcctgtacgcttgtctggtattttgcattgcactactgccttcaagctctccatttcctggtattgtattgtcggcccttggcttctggatctacctataaacattgctcctgtggctggtcccataggtggaggtttcaatggactcgagcatatctggttgctctgttagctggtccctggtggttgtcttgctatattgctgtctgctgtctgctatcttgagagtctactgggttagggctgggatttggactggactgactctgagactactcttctggatcattgtaaatttcttaattcctgaatggaatgtatataggtatggctcttctatctttttttaatgcttgatattcgccggatgaccattggcaagtggacctcggaactgtacaatactcacatatatgaagtctacatacatccatacatgtacatagaaacattgggtgtacacctccagacgtcttatcaatatgtctatcgataagcatactgcctaccattatcgatgctataggagtgctactcaaggcaacaacgaccgtgttgattgtataccgccttgcacgacttcccataatttgtatacaccacccaagcaacttcgagatgatcagtccatccattctctttttaccactctccacagcatcatgcgctacagaaactgggatgtccttcttttccctggggcttcgaaggcccccatccaagagttcaagacacaatgttttgtgaccaaggacaaagactcgccctatctacagaatgctgtcttccttggccctcatgcacaccatcccgagccaggtgtttttaaccagctgccagtcctcacaacattcatcccaagtctacccaaagacagtccgttccaagtctcagttcacagttgggagaagccacgtcccagtgtccagattgagtccaatatggaaccagaggacgttttgctgttcgaggcacgggtcttcgttgatggggtctttgttgcgtgagtaacttacgatctatgtactctgatgcttggattaagctgatgtcttgcaggggtagtatctatccacagagaactagttggccacaggttatgggtatgttgcgcgcgcttgcttcggcacaacgcagttctaatatccccattgccttgcttggttttattattgaatagctactgacattcatttgccagatctgggctctagtatgcgattccttctttccctttgatttcaaattctcacagtccgaacagatcttgatcgagatggaaaccaagatgtccttcgatttcctcccttccatcctgagatactacaacagaagcattgggatgccggggattctcaaggtcgaatcaaggttatcatcgcagaaggtttctctcgccccaaccgctcacccccgttcgaacgatacaagcatgtcattgctttctctttccagcatgcaccactagatgtgctggaattctctgacattgcttggcccaatcccaacatgtggcttgctatgccgaacgcatcccggtatggatcggcggccagatatagtacccccagggcagttggcgatggcgcacatgggcattcgccaagcaaacctagcagatccgatcatcgaagtacgattacggccaacacgagcagccaatctagcagcaatgcagctacttacagcggtagtaccgcatcaacttacaatgcctggacccctcaccgtgggtttcccattccttccacacaatggaacggctatccacaagaacctcgatgggagccacaggaaacatacatcgtggaacctgtcatagacgccttcgttgatgatacagcttggcgacagcgtggtgctcgatcctctcgcgaggacatcccaatgccagactatacttccacgggatcgaacagcagccgggccatctccagcatgactgggatgagctacgaacacagcaagcagcccagcatcaattcatgtcttgacgatgagcaatacaatgagctgattgaagctctgacaccaacgaaggctcctccaatgggtacgcgcgcaccatctaatactccatccgctgtcgccgccgcgacatctgcctcaaagccttctgctgcagccgaagctcgatctgcaagctacaagacccgaagccgccgtgcatccgcactcagggagatttcacagtcaagcacccgtgatgtttcgggatcgagcgagcccaagaagaacttgactccatccaagatcggggcgtgtccaagcgagaaggtccggagcaaaaaggagacccagaaagaggccagccaggagacccctaaagcgcagtctaagggtaagtgtaaggggattgcgaacgaaaacagcaactccagggatgtcgagaatctacaggacgagaatgagtcggttttgtaggatcgcactggccatgatcatgatgcttttcagcttatacttacctaatcattcatttgttttagttcagtgacatgaagccggcatgtatcttttatgcgagcttcaaccaatgcactttttactacgaagtcgacaaatgtactgttttataaaaacttcaatcgataattttaccctatttcaagctgacaagtatactttattcgaatttggactaacactagttactatcacgaagagtctttatccggatctcgagcaataattcttccactatatgaagtactgttttatgcatgcaattcctgtactactgctactacttattcacacatgatataacaatagcagtagtatggtattggatacctggcattacatggtgtcataaggcggtttcaaacttcgtgccttctcaactgccttctcaactgcttgtttggtatgaagagtcactctaccaggcgactgtaaagtgacttcgctctctttcttcccctccctctctctcttccctatcatcgcctcttttcccatcttcgttcttcgctgccacacgtctcttcttcaccgcatcatatcttctctctttattgttcatgaacaccacggaccacaatatccagccaggataaggctgttcctggggtgtcccaggccaccaggcacccttcattcattactttcttcaggctcatcaccatgatgactgtcgcggtgtgtcctttagcataaatacatcactcaatacattcaaatttggattgggaggttctacttgattgcaaatgtaagaagaactctttcaaaacacgtagttggctatatagcattttgcactattcttgctacaacaccaataatggagggaaatatctcgaatacatacaaaaagaatatccggggagacatctcgggagactccaaaaaggtcttccaaggacgcgttataattgaccactttggcatgttccatagcataaagaccattaaaggcgcttgaactatcaagttcgaagtatttccctttgcttaatcaaataatatcaacaattctcaaaaaaaagagctatcgatggacaagtctagtgagagttcaaacaaatgttatgctcgtattgaactaccttcaacaccagagcctctataatgataatttcactacaaaaggaactcaaataaggaaaatatgattgattaagcttcattctatctaaagccagggagctgtccctagcgaaatggttcaaaaaagctttcagagacaggacaagcaagtgggggtcctacttgcatagtgtaagtatccgtctcatgacaagcgagattcaaagtacaatgaatcaagcttttaaaaatgccctcagagttctcttcatcgagcaagtaaccagagtgctgtctctgatggaaaagttccaaagatttgggttttgatggcgtctgtggccacccaaggattcagagaatccatgcatgtagtaggccctcagaattgtgtcttccttggaaccctgccctgtatcctccgcgcctcctttcctataccctccgcctcccatctcgtagaactttgtcataaccccggtgggtgactgttctatatcctccccctgtctgccatcggagtcctcctcctctgggacgaggccacgccgggtctcagatagcccatccttcactcccccaaagacgtgattcactttcgcgcagtcagaggtcaagataccctcagagtcctcttcactgggcaaggtcacatgtccactggaaggctgtgtcgaatgctgcttccagtgggaggccaggggaatggttgacggagggacctgtgaaaggggcaatttctgctatatatcgtctcatgagtacgcggggacttaccaatggccttttgtgagacacagaagactcacggccccgttgaggcatgcaagtgttagtgttggagagtgtaattggggagagaccgggacagaaaagactccagcctgaattccatgaacttcaggtgtgatagagagaacagcaaaaaacgcatgtctcgaaaatgaaaaatatagaagatgaaaacagacaaagtatgttcttcacaggagaggaaagaggaaagaggaaagaggaaagaggatgggatgggatgggtgatgaatggaggggggaagagaagaggaagagtagagagggaggtttgacaagggaagatgagagggaggagaaaaaagaaggaggaaggattttatatcagaagcctggcccgtccgactcccaattagggaaagtagcattatagcctcgcctactcccaatacagtacaacgatgacatggtgactgcgtattagacaatacctggagactgccaccttgaatcgacagctcatataggaattaaaatctgcattgtgaccaggccactaaattgacttgacttatactatcactatcatgccagcaggctgtctacatgtacacaaactccaagactggtggacggaggaaactatccatgtatgagttcgaatcaatattttgagaccaggaaaataacatgaaataaccataacgacatcgaaactcctggaatttgctaacagggaatatccaaatccaatatcaatccggtctcatcccatcaacacactaacaccgacagccacaagtagagtcgcgaaattcctagttcttttggttcctttttagatcagtgccatttttcctctggtcactcctatgtccggtttcagggataatatgggctggtcgggtggtacccgggtctgatctcaagagtataggcaaagtgtaaagagaagagaagaaaaagagaaaagaaaagagaaccacaggctatatagccagtgtgatagaagtagaggtagaaaaggcccactaccagtaatactggtgacaaaagagaaagggaaggaaaaaaagggggaaacggccggcatttgttggaagattgttcgagattgatcaaacgagagaagatgagtgacagaaaaaaaggaaatcgttggaaatgaaagtatgaaagtgcactggatcaaccgtagggaactggacttcatactgagaggtatcaacgttgcccgtacagacaaagccaagcaaggaattaagtaaccacatccacaagtaaaataatagtaataatagaaagaaaggaagagaagccaagaaaactcgtaggtcacagtgcactaatctcgaatacagaagagccccggccagaccaagcagtccctgctatcagttgaaggatgctggtttcctaggacgagcaagggaggggataggagaggatgcgatgaacaaggtacaccaacgccaatctcacgacagcacatgcgcagaaaacacatatccagataattgagagacaagaagaaaacataacaggtcgagtatccgcgaaaacgcactagagcaatgatcaaatgtacaaacaagggtatatcggaggtgaagcacctgaaggaccgttaagacttttacacgttcacaggccgtcaccagcacctgtttcaacaccatcggccgaataggacatgctgggatcgaacccaaatccagtagtgtcggcggcatccgtgttgaggaatgtgtcaaagtcaaagtgctccaggatgtttgggctttccagtgggccgaagtcgaggttgtatggcttgcatggagtcagtaaatgcatacttgtaggagacgaggtggaagaacatacatcaggaatactgaggtcagcgaaggattgctgttggtcagggggtggctgcaccatggtctgaggagcaggtgccgaggtcggctgtgatggttgagcttgcccgttcgctccattcgctccattcttgggattgaaagaattagggtgctgcggcgtgacgggggtcgatggagtcggtagctctgcagcttcggtggatggagttgcacctgcggctgcactggcagcagcagcagcagcttgcttcttgttaggtcgcttggatcaagttagcgaatgcaaagaccatagcaccaattgagagtatacaaaccttgcgggcgtccttggtttccttcttgcctttcggtgcagctttggtggcctgctgaggtgttggtggcgcgttcccagccgtctgcggtgacgctggctggccacgaccaacgttaggacccgtgacaggtggcgccgagggcggaggcatcgcgcttcgttcctgtggggtcccagcctggggctggttcgcaggtgaatgctgcggaggcatctgcggttgtcctggctgccattgtccactaggcatacgctggccggcattggccggaatcggctgacccatttgagctccagtgaaagcagggttagagctaggaggtcgcatattcgatccagggaagaactgagcccccatctctagtatcggaccaccgttgaggttcatggatccaggtgatccacgttgagacatgtcaccggcatttggcgacccgggaagtccagtcggaggtatcttgggcgtacctcgtttcatttggtcattaggattgggggatgtgcccgccctgctgcccggggaagcgcctggcggtaatattccttggccgggcatcgggggctggccgtcagaccgggcaatgctatcttgctcttgacgagccatcatcaagcggcgcttattctgctgttcaagcagcataagctgcatttgataatcttgaagagcatggttaccatgctgagtgccaggtgtctgtaaactaccgggtcggacctgggcgagttgaccgttcgcaccgtagtaatcaggaccaccagccataggatacattccttggccatccggcatcggcatcagatccgtctgattcgccattacaccgggattcatcatgccaccattcgggataccctgggaattcgatgctgagcgagagtgatgaagggccaagttttgagcatatacctgcatagatttctgttgcgcagcttgtccctggaactgctgaaattgggctggagtcattcccctctgcattccattctgcattccattctgcatcattatagcctgcgggttgggctgtccaggcattccttgtccctgtccacggccattcggtgccagctgctgtccgttgacagcgccttcaaggcgtgggcgtttcgacggcgaaggagcgttgtcggcagacgctggtgactgtggtcgatgtccacccatctccatatccggatcccgttgcatttgctgcatcatctgcaagtgctgggtcttttgatactgcgccagttgttgttgttgcgagctagaaataatctcatcagcacgtccacccccaactcaacagttcgcataggcaaggagatattcagatagagcatacagtccagtggtgttgttctgcagcactgttttctgcaggttaggaggcaccatgccattctgtctccggagctggttcatctggccgggcatcatgggttgctgcctcataaattgattgtgctgttgctctcgcagacgcataaagttctaaatttcaggattagtccatgatcaacatccccgaaggtgatcgactacgcacctggttgtgctgaagatattgcctaatatcactgctgtttcccttcttgcgttgagcccagaagaactcccaaaaaaggctgaaccaatcgaggaggaatgaggaggcactttcgttgggaagatttggacgagggagatcatctgggattttgatcttctcaccgtccttcccatcggtcatcatggcatcggggtccataccattgacatcaccatcacgccgatttccgggactcgtcttggggttgttgtcggtgttgagtttgatggattcatcttgcaagagagcgcgggcgcagtcatggtacccacgtttcaaaaagtaatcatagatatacgtgttgaggttgttgaccaagacttcggggttgttcatagcgccgtcgtttcgagaagccgtggatccgttgttgatcataggaactccacccacagggcccccagccccggggttcatcccgacgttcatttggttcatggtggcgaacggtgggactgcagccacccttgcctgcggtatcgtgagattttcaaatcggagatatgtaatttccgacgcgcgacctccgtttcaggctatcaagcctaacgcggggtgatagaagcgacgcgtggaaatggaggcggaagcaaagcgctgaccgctttcgaatgaatatccaagcctcgcaggctgagcaacgcgtgtgcgtaacggcgcaaaagaaacgggtatattatcgcagaatatgaggaatttcaagatcaccggtggcgtcttttcccgaagaaaccacgcgacagggtagaaacgagaggatggaggctcggaggcgcagatgtagtatgttcggtgtgtctctgactggagaaattgatgagcgcttgccagagcattaaacacttcaaacgaccaagtgcaagagtaagtgcgcagtctatacggggtggacgatgacggaggtacaaggaggcggaaaaagcgcacaagtgaggtggttggtatggggggcggcgccagacacccgatcgggcagaatcgcggataggagagtaccaaggccgtgtacaaagaaagagaaaacccaaggacaagaaacgaaaaaagggaacggattaagaatagaaaaggggagtctaagatatgtggatctcacagtgggaagatgaggacgggttcagtgagagagagccggggggacgtacattgacaggcgctgccctctgcgggagaatcgcttgttcggagcggatcaacctgatcggaggtcggggctggggatggcgctgtcaagcgtatttctgggaatgcaccgatctgataaccattgaatttgcggtcttcgacaaaggagaaacgggagtcaaggaattagcgaaatagaaatggggatagatatggaaatatggcgatttgaagagatcgagaagaataaaaaaaagggacgaaggaagggaaagtcagaagggtgatatgatacctgatgggccctgcgatggatcccagcgggagtctaaaaagtagggtaagccactatttcgcgaccaccacaaaggttagatatatcgaagatcgagcgatcgtagagaactgaacaaatcgattgaagaatcaattgctgtggaaaagtcgtgcctaggtagaggttgaagaaaagatggaaaggagggaaattcgatctgtaaagagttgaggggcggcggagatagtggtacggaaccggtatggcctcgcgtttgtgacatacagtacgtgacaaatacactgactcggatgttccgttgaccgctatttaggtgcccacgggaatttgtatgtactgagccgaactgcaggtttacgctgcaatacgtgtttggtaaaaaccatacagatcgagctcctgagcggcagattcgccaaggatctacacgtataaaaaagggaaaagggagatcatgcgatttcgatgaactgatcgcaacatgatctcaaaccttgccccaagcccggttctgctcagttcgaagttaactgtcagccccctatgccagtgataaatcgtgtggttcagcgcaggatacatcacaaagcctaatttgttgaaagacaggtgtacaaatagagtgattatcagaagcaataatgacgagtaagggcaaaatgaccaatccccctaaaaaagacataaccagtgaggaaccccagaacgcccattcttcaagtagtgtaaatgcacaagatctcacaaggtcattactcttcctccggtggcatctcatcctcgatgtatcgtacaagggagacccgcatctccgtggtatcatctccgcgtagcacgtcactgacaaagtgtgcctcgatctgcatttgaacctaaaagccgggtcagtgatcggacccgtaacaagggaacctaatccaattgaccacttaccatctccagggaccctcggaggacgccacacagaatgttagagaaccatagctcgtcctgagcccgcccatcatcgggaagctccacaaagtccgccaaagggttgtcttcaaaaataagggagaactgggtgttgtcactagtccagtttgtgactgtaggtgtgacgttcagaaagatcttgaagccaacctgatcggattgtcagccatcagagatacattgtctccatgtactaaagtaactcctaccttcgcgatcatatcagctgtctcccggaagttgacgcaacggccgacacctgacttggccaggaagtcttcaatgagtcgcattccaatattgtatcccatcttgtccaactgcttgttgacatcgtgatagttgctatcatagtcttggcataattgcgcgacaattgttccgtaggttaatgtgaccagctccgcgttgactttatcgactcttgttctgcgcatatgaagaaagccgattagttcggattcgaggacagggatatggcgaggtcaattgatcatcgctcttatatcccagtaagcgggcactagggcttactgacttccatattctgttcgaaggccattgattagtagaaggtccactggataaggcattgggagtccacctactcttctcctatccttgagttttttgtagacgacatcttcaggattatgctctgatagcccggcttgttggtaaaacagaaaaagaatgcggttcagatagccacaggtaaatgtgacagtgttgatcagggtgattgtggggagtccgtgattgttggagttgctgattgtacacggtcggggtacggcggacgaaactggccatgctaaactttgacttgattggtttctttcatccaccgccctctactccgccttataattgatagggatcttacctatgagtggggtaaattaccatgtcattttctgcccgacagaaataacccaagatgatcaagtctcaatggtcgctctcgtccgccggacacatccagctcaccgccgagcctaggtgggattatcgttattcccgcagcttctctgaacttttgctctccactgctttcgaggtcgcgattggtcaccaattaattctcctacctttccaaactcaccgaggtgcttgctgtgacaatgtctggtgaaaagcgccctgctccagagggcttcgggacctcgcaccagctcgtggtcaagcgaaacaaggccgccgaaaacgcaggaaccgagcttgtgaagggctcttcccaaaatggagctctcattcaatctgtatgcgccaagtctgccttcgaagctcaacgggctttcacggagaatagccagctaattttaatatacaggttcctcgcacaagtggtttggatgctcctatcatggaactcacaggtaagactctgtcgccaatttgtcgctataacacgcgctaataaaaggaacctactaggtcactctggtgaagtctttgcagtccgattcgatcctaccgcgcaacatatcgcatctggatccatggatcgttctatctgtatgtcctcgtcttgatccgggaatgcggccgccgaatacgttactgatggagattccttgaatagtactgtggaatacatatggacaatgcgaaaactacggccaattgacaggtcaccgaggagctgtgctggatcttcagtggtcgcgcgattcgcgggcactattctcagcatccgcagacatgacccttggaagctgggatgtggagaccggagaacgagtacgccgtcacgtggggcatgaggagatcatcaactgcctcgatatcagcaaaagaggacaggaacttttggtcagtggtagtgatgatgggtccatcggcatctgggatcctcggcagaaggatgctctggactacctccagaccgaactccccattaccgctgtagcattgtccgaagcgggtaatgagatctacagtggaggtattgacaatacaattcacgcctgggatattcggaagaaggccatagtctactcgatggccggacatacagataccatcacatcactacaaatctcgccagactcacagactttgctgtcaaactctcatgactccactgttcgcacatgggacattcgtcccttcgcccctaccaaccggcaagtgaagacctacgatggtgctcctgtcgggctagagaagaacctcatccgtgccagctgggatcccaagggtgagaagattgctgcaggcagtggtgatcgaagtgtggtcgtctgggagaccaaaactggtaaattgctgtataagcttcccggtcacaagggcactgtcaatgacgtgcgcttctctcccaatgatgagccaatcagtgagtatataccctgtttgcaagcaaatccacaatttctaacaaggtcacagtcgtttcttgctcctccgaccggaacctgatgcttggagagcttggcaaataaacatatatgataggtattaatgttttaatgaagatcagcgggcgtcgaattcattttttcaaacatgccatgtgcatccgttcccgatctagacgcggagaacggtcttattatcagagcttccagaggtcatgacttgtccggctattcatctggatctatgaattgtacaacaagaaccaaagtccaaaaatgctgctcttgaatatctctggttatctacaagaacattcttatgtggcctttgtattaggctgaccttggaatattttcattcattgtagacccgtggacgactacatgtatgcctttttccaatctctttgggcaaacgacgtaggtaaacctatcacgatctcctcccaatgcaccagattctcgacgagtctgcagaaactccttccccttggcacctcatcccaaaggctacagggaaaatggttcgcacgctgtggtacctgccatctagttttgtttcctctgtctccagtaaggcaagtgatgagtgtggtattgtcattttggcgactggtttaatccgtgtgtcttagttatacgagctttatttctaacatctgcaacgtagtccagcctacgctgtcatcctaggaccagcggaccgtggcttggatatttctctatcattgaagcattctgacgacttccatatctctgggcacagagagaactccatttcagcgcatcttctgctttacgtatatctatatggcatgagcaactcggttggtgagaaaatgatggtctcaagctggcctctcatgttgacgtcgcttaatcccaaatatacctgttgcatgtcttcttagggtctacctctgaaactacaatatcactgcatattctatagctaagtatagctggtatccatatctatatggtttatagtaggatagcacttgaagttcactccgtagagtaagactcaaaatgtaaatagacaaaaaggtatctaaattcaagatcgatcagtagactaattttataaacattccaaccttctacaagttgtatagacagtaactatagcatgcaagaagatgatgcaataagcgggaaaaaaacattccccagaggcttatctggccgaatcccccaacttcccactccactcgaacaagccgagggtgatcaccctattaaaccagtctcttttcagagaggcctgaaatagaaggccatctggcgccctatccatgatccctacggcgctcaggtctgctcgaagcgcacgcgacggaggcgatgttcaacctccgctccgcctacatggtggtctgggccatcctgttatggctcaccgtcgctcatggcatgcgagacagcctagtcaaagaactaaggtataatatatgctacccctggtcatctccgaaagccatctaaatccactaatacgcccctgtccttccgcagacaagaaactgagcgtatgttcttccatggcttcgagaactacctccaatacgcgtttcccgaagacgaattacgcgccctgacatgcggccctcttgttcgcgacgagaagaatccggagaataatgacgtgcttgggaattattctctgaccttgattgacagcttatcgacgctggccatcctatcctcgagcccggacagtggggagcaagccttggcacatttccaggatggtgtcgagagctttgttagactttatggtgatggctcggatggccctgctggtcagggtgaaaggtcgaggggatttgatctggatagcaaggtacaattgtttgaaactgtgattcggggactgggtatgttttcttttccctcccagcttattgatttgttgcatatgctcgatttccggcttttgtgtcctactgctaacttattccaggcggattgctcagtgcccatcttttcgccgtcggcgagctacccatcaccggatacgagccatcagaacgggaagtggcattcgctagcgcatgggataaaagcatgtttatgaaaagtgaccacggaattcaatggagcaatggctttgtctatgatggccaactgcttcggcttgctgtggatctggcccagcgattactccccgcattctatacggagactggtcttccctaccctcgggtcaacctgcgccacgggattccattctacgagaatgcgcctttaaatctcaaggtccgagattccgagggcaaacgcaaatcaaaaacggcggcatctgagccggctgagacttgtagcgccggtgcaggcagtctagtccttgaactgaccgttttgagccgactcaccggtgatgggcgatatgaggacttaggcaagagggcattttgggcagtctggaaccgccggagtgacatcggactgcttggatttggcattgatgtcgagtcggggaaatgggtgggaccatgggccggagtaagcacgattcttttgacaggtacaagcttagactaattggaagtagatcggcgccggcattgacagcttctacgagtatgccgtcaagacgtatgttctcctgtccgagggcgagcgtgtgcctttcgactccgacagcccttgggcagcattagactcgtactatgctcctctgacagactatcagcataccgccgatgccttccgacaagtttgggaagaatcgcataccgcgatcaatcgccacctattccgaggcgaaggttatcaacatccccatcttattgtaggggatgtgatcactggtgccacgcgggctttctggatcgatagcttgagcgctttctatccaggggttcttgccttggatggaaagctagatgaagctatccagattcatcttctgactaccgcaatctggacacgctactcgggcattcctgaacgatggaacgtggctactggtgacatcgataacggtatgccgtggtatggaggtcggcccgagttcatcgagtccaactactacatttatcgtgcaacccaagatccgtggtatctgcatgttggagagatggttctcagtgacctcaagcggcgttgctggaccaagtgtggttgggctggcattcggaatgttctgactggtgagctcattgaccggatggagagtttcttcattggggagacagccaaatacctatatctgctgtttgaccgggaccatccattgaacaagatcgatgccccttgggtttttaacaccgaaggccaccctcttatcatcccaagaaaaccggcatccgcggctcgccagcagcgaaccccatctcaaggccaggacatggccggcggagtatgtcaaattataccctctccattcttcggcgtgtcctccactgcatcccgaacagacatctttcatgctgccaacttggcacgcctggatctaatgcctgatcgaggagtggccgcaggtcctattttggaagactcgcctggacatcaaagtgtctttgtgtctgatctttcctcgccaaccaattacacattctacccgtggaccctgccacctcagctggtcccattcaacggcaccagcgcgcctatggccgttcggcccacgctcgacatttcattcccgtcacttccaggcggcgtaaacatgggacctggagcgttggaacgtgtccgagatggggtacttgtaaaaacaattggaggcctccgactaagtctggttcaggacgtacggttggaacccccgacggccacgactggggatgaggaagatgggtaccgggtgcaggtgatcaacaatgtgccattaggcaaagatgagaaggtatatctctctcgccaaatcacctttgatgtcgtcgatccctatgatccgaacttcacccgtgttcgcgacaatgccatgcttgacctcgtcattgacgttctcccagagccctctcgccgacgtaatgattcggctcatccacgagatgaaaattctcaaccagaaaatccacacccgccagaaccccgtctcggaggccacagcctcgcctcttctgtcaacgatgccgcaattgttgactccccagactcaacagtaagagccatgctgtcgtctctgatgcactcggtgtcatctttgcttcataccgaaaggaccgaacctgctccactcaggttgagtctccccgctgctatctctacaggcatcgggtccagcccgcttcccgatattgaagatgcagttaccatgtccttgctcggcggcccatctacagaccgcctgtcgtggtcaagtatatacttcgcgggcgagctctgcgacgagcgaattctccgtgatgtcgcccataaccacgaagtgctcgttatcaaacgtggcggctgcaccttctcagaaaagctccgcaatatccccgcataccgaccaacgcgatccgcgttgaagctaattgtcgtcgtctcatacgacgacattccaccacgcagcttccgcgagcagaagaaagagccaacgaatcaatccgggtctcgctctgccctcgccgctgtccgtgccgaatcgactctcgtccgtccacacctcgacgaagcgcaaatgacagccagtggcattccacgaaattacctcatcagcatggtcatggtcggcggcggagatgaaacatacgagctcctgcgccatgcaagcggcatcggagtcaagaggcgatatagcatgcgctctcgcggcgtcccgatcacgaacttacacattgtttgaatattcatcagatatactataccctattggaagactgtcggatcatttgtggcgtgtttgttttatgtttcgcagatatgcataattttagacttgaatatagtcaaacccagtttcacagagaattgaactggatgcatttggtgataatctacattcaaagtctcgacttactctccatctcaacctgaagcttcctccaagagtcaaccgccctcttagccgccgtctcaggactaatctgcccatccgtcatggtccgatggaaagtctccatagaaatccacccctcaaacccaacatcaacaatccacgccctagcaatatccacaacgggcaaataccccccaaactcaacctccaaagggaaaggcctggcatgcttcgaccaggtaaactccttcgcctcaccgggcagcgcccacggatgcgccaacgaataaggcggatcaaaccgctcggcatcagaaagctgcacatagaaaatcttctcccgcggacaatcgcgcacaaacctgcgcagcgaatcccgcagcttagtatccgcatccatctgcagtccgttcggagaggaattatcgccccacacacgagtcccttcgtggaaggtatccagacacagtccgaagttcggacggtcgacccgctgcacggtcgacagggcgtcttcccaggtggagcagtttgttccccatgacagcggctcgtaggcgattgatattactggcttgctggcgctggctaggtcggctagctgctggaggtcggatatgattgttttctcatcgcggctgcagtccgatgtgaagactgatggcacttgcaggtaggttgcgtgtagcagacgggcaatttcgagccagtgtgaggcgagagcgagcctttcttttagcggggttgttgcgccttcgtagttttcgaagggggctagggagaggacttcgacgtttgtttcctggcacagggcgtagatcttttgagctgcgtcgtggatggaaatgttttgggctttgctgtaggcgaggaggtcgttgtacactatttcaagtcctgcgatgccggcttgggatgcggcgcggattttgtggtcgaggaggtggcctgggtattggctcagggagatactggcgattgctagtttattggacaccattttgaagtttttttcaggaattgatattaaaacgttgacttgcttctatgaccgaactgatatatcgaattagggcggaactcggtttccggtatgtggaggattcgcaaatcgccaaccccgcaattggccattgagttattctagtcaggcattgggtggatgtatttatcggtcattaatgaccgaaagtgtgaaatagttgatcatcgccttgcaagagttgtcggttggaactagaaatccgggtacttaagccgatactgggataactacgatatgttggaatatatcttcaagctcgcaagcagcaaatatacaatacaaatttgatatagccattgattcatatctagcaaatacgtcaataacaaattcaactgcgatcatctcccataacccaaacccctcacaatatgaggctctgtctctatcaaagtttcacccccacgcagagtagtccaatcccgcctctatgaagaattgtctaagccacttattaatcctttcgtgtggacagataccactcttcacgccagacaatccctttgagaaatcgaaagtgtaggtatttctcacatgcaaagacctggactcggaacttgaaagccctctggtggattccttatatagtctcgtttcgattgcgacttttgcataaggatgactggtgacttcacaccggtgccagacactgaacgcgtaagaaggataaaggaaccctaggcggcatagtctttcgtgatcgttgcaagagatcgtagccgacaagggttcccggtctttgaatgcgattctgagacagggacatatatcggctaaccccgcatagggcacgcagatcacgccaccattgagtaagccacacctgcagcaattagttactctctttggggtgtttggggggtttgaatgcggagcttcggtgtagattcatacacatcacgcagcatttccagcgtttgtcttcgagttgtcgtagaagctggattcgagggttttttcggagctcgatgttgcggtatatcaatcgacgcccttctctcaggaccagaagtttcgcatggtctgggtctttggcctgaaggaataagacaaagaaggtatagagatctttataagtcagtgcaaggtagatttgctctagcgcggagagatggggagaaatacagacatatgaaggagggagatagagctatcaccatttgatatggaacgtggagcttgcgtttatgagataggtaacactaaatattgtacatagggcttaggcagtgaattctcgaagcaagactaatatatttcatagggaaactagcatatcaaggttatacataggaaagtcgttttcccttctgccatctacatagaaaaggatatctagaaaaaagactaaaaaggctaccataaggccaactagatctctcgtttgtaccctatcgagtaaaaagcaacctacggcaagcctataacatcgggatttggcctttaacatagttaccaagtgagtaaaaggaaagacgtgatggagatgggttccacttcatgtctccaaattcttgtagaactgaacggtaatatcaaccccccgcaatcggggctaagtatgtggtcatttactgtgaactctcttctctcctcccttcaacatataattgcacataacaataaccagcagctcatcaccatcaccaccagaaacaatgctccccaacccaaccacccttcaaccagcagaaagacacacccaagccccaatacctaccccaccaactacaaaaccaccccaatacccaaaatacctctacttcgcctacggctccaacctctccccagcccaaatgaaaacccgctgccgcataaatcctacccactccgctaccccactagcaatcgcagccctcccacactggcgctggctaatctgcgaagcgggctacgcaaacatcctgccaccacccggtctgcgcgttgcaaaccaagactccgagaccgcacataagattcccgtttccgggtccgaggataccgtctacggcgttctttaccagatggatgttggtgatgagcggattctggatggctatgagggggttgatacacgtgctgctgatgcgaaggctggggatggtgtgtccgtttctattaggcccagggtgcagggcgatgggtcttataataagtggtttgttggagcggatgttgtgaaatggctggatggggcggaggggatcaaggcggggcttggggatggaaaggggaaggggaaggtgccggttttggtctatgttgatgagaactgtgttaggctttctgagcccaagtttgagtatatcgcgagaatgaatcgggctattcgggagtctgtggatttgggggttcctgtgggatgggtggaggaggttatgaggaagttcattcctgtggagtgaaatggtatagatttagatttagatttgagattgatcgatagattgataagatggatgtatttgatcatatcaatcattggccaggtccaattcctatagagctactctattaaaataagatgtaattagccagtgactgcaatctatacacaatcaagtcgcattgataaagctatttgtctatatttgggtattatccggccgggagctgcgccagccgtggcgggtgccgtcgaccagcgaaacgaacctccagactccaagttcgagtaaattgtttgattgggcggcccgggaggagcggatggtaaaacgctcaccgcaagatcgggtgtggtcgggcttttgaaaagattgggtcattataatcggcagtcgagatcgtcgcagaaagaatgattttttggggagcggtgtgtagaattaagcctggccagagaggagagtgtgaaccggcgcggggagcttgtcgcgtccgtgaaggaactccagctcgaggaggaagatgaaaccgaggacctcgccgcccatcttctggatcagctcaccggcggccttagcagagccacctaagaatagctattagtatgaagtatccaccgatggattcttgtcacataccagtagcgataatgtcatcaatgacgaggaccttctggccgggcttgatagaatcggcctgcatctggaagaaatcctggccatactccttttcgtatccctgagtctcacaaggaccggggagcttgccctgcttgcgcacggggacgaagctggcacccaggcgcagtgccaggctaggacccatcaggaagccacgggcctcgagaccgacaatgacatcgggcttctggttaccgtagttggcggcgacgtgaagttccagggagcgaatcagggcctcatgcagggaggggtcggcgaagatgggcaggatatcctcgaacaagattcccggagaggggaaatccgggaactggcgcagggcggcgcgcagtcttaccgtaagactggcgagttcggcggcgctggtggcatcggaggcggggagtccgactttggaggcatctgggagcgtggaggacattatgagagagaagagaagaaagaagaggggaaagaggagagggttggaggtaaaagggttaaaaaagaaaaagcccaaaaaacctttggaggggaaaaaaagaggaaatggtaaaattacagttgataagccgataatgggggggtttcgtgcccctcacagggcctagatcgttacttgttttttattttgatcttttttatatagaaactagatgttatatatatgtctatttggtttataacactagaatataccttatatgatctctatagtaaatgttggcatatccttctatcaaactacgggttctatacttccaggtacacaaaaatcagcggtcagatcccgccactaaggtaacttactgtcacgcaatggcatattattcttcttctagaaggtaagactactgtactactagtatacttactttactcgtacaaggggttggatatgggcccggcttggatctgcgagaccctaattgattatcccgtaaacctagtgctcagtcctctcgtcgccagggcacgaattgtgttggactaataccactcgatcgtcatccctgacaccgtgttccggttccccagtagcctagaccgttggactgcgacctagactttatggttactttgaaggtcccgaggtccaggggaggacagaaggcagggctgaactagggctaagaccgccagactaccaagggatcatcataaatgactcatggctccttgaccagactggagctttagaatcgcattggatcagaccatctcaccggatatgcgccgtatggccagccttgacacatcgtacggccatttcacctagccctagccaataggatctctcgcgccacgacgtgatctgaaactcatcacaatggctttactggaaagagacatgcgtgctgcatagcgggatgtctgttgtgcagatggtggggggatttgtccgttgtctgctccgcccctcgctttgactaggggaaaggaacaaaagtacgaggtaaaataaaacagaggaagtgcaggttactgtatactataggtcaaaaaggaaaaagggcaaaaaagaaatctcaggtttggttttaggaatagccgaacgcgggggtcgaacccgcagccttaagattaagagtcttacgctctaccgattgagctagcccggccgggctgttgaagagagcagcgaaacagtgctccatggacggaaacaaggtctttggtagaatatagacatgcaggtggcggtcttagcgcatcctgcagcccgttgagaagcataactgtatatgacactgtcatatagggttgtataactacttgaatgctattttaatttgattatactgtacctggtgttggtacatttgatggcaacgcaaacctcttcaataatctcttgtcagaaaatcatccgacatatataattaccctccccacactatcattccctctttccttccctaaggtgacggcgaaataatgctacataagactaaacagtaggagttcgaaattaatatagtcaaattgtgtttatttagctggaattattgggaaatataattgcaaaagatatatcaatctccaattgagcgtcgatctttcgaatctacaccaagtacagaataatatcccttagatacctcctaggtgagcagttgactgtccacagttatactttacttgacactataaattccatcatccaaagtcactcatagcctttatgttgtcacctatatgtacctgcatgtacctgcgtataccctatgcagtaatgctacatatacgtcccatgttgtacatcaaagtatactcggcggcccaagcctaaaacgggatagcccctcacatgaccagcacggaccacctcgcttcaagtttttccgttgtctccccatcgctataaatccgtcggtttccttcctttccatctcatgcttttaaagattgggagcctcaacaggccacttcgatttcagatgaattttttctgataccttgtaataaattcactcatgtcacccgccgtgattaccgagatgcagccggatctgcatcatgaccagctcgaggccgtgggcaaagccttcgatgcactcctactaaccgtgtatcggctgactcacagacaaaatgagctgttacagcacatggataatgtcttcaaagaggtaaattcacttctctcctcccttatgcttctgcatcctggtctcgcatgacgaagaaaagctctagatcaggagtcacttttgtggcgatgacggattaacatgtattatctgattgagaccatgactgccttgctgttatgcatttgacaagatgaacattgctaactttgtatcttgcagtacacagatgtgatagaaattctgcctcctcaagatagacatcgtgcatttgacgttcaaaacaagttgctcgctcagcaagaagaataccatcagggtctcgtacacagcaagcctcaagttatggaacaaccgttgaattccatggatgtaatcaagaccctcgttgcacatcaaaatgtagacgaaaatactttctccgctatcaagaatggagtcaaagggtgcaaatctctactccgttcccaagatagcctctcccaaatatcctccaactcgtgcatcctcgcgcaagcaccggctccagcaatcgcgctggagaaggacttcacaacgaatggcacccagggaaatctccactgccctttctcgaaaccgaataagatgcagagcacaaatggcagtgaggcccccagcgggaaaaactctgcgccgaagatccagatcgaagcttgcggccacgagcatctggaccccatcagggcggaactcgaagaacgacgctctagccacacaccatcagccccgtcatcaaagggaggatgccccgtctcccgatgccccatccgattcctcgatcagcactccccggaagaaatcgccgaatatgttgaacgacacaaacatgagatccctcgcagccacgctatttgtgtcaagcgctatcagcgaagcccgcaggatatgagacaactggacgccaaatacggcggcctgaccagcatgatcgctggcctaggtgtgaagcaccaagccttcctgccggaatgtaataccaatggtgaagcccgttcctcgcattctgcgtcgagtgaacgtgttgagaaatgggccgagaacgtggacctcagtacgcccattgtgcagaacgaggaaaacgaagagaagaacgaggagaataagaacgaggatgataaccgccagagtcactttgaccgccccctgcgtgaagtccgcgtgggtgaatccccgagcaggccttggggtatttcagtgcctgtcacacatttacctcctatctcagcgccggtctctggttcatctatcccaacgtcccccgaccctcaagccgacataccttataaacccaccgatgccgaagtccttgctaagcctgccggtggctgtccattcggccacggtaaaccaaagcctgaagcagcaaagcccgaaatcgaaccacctcggactggggaaagtcctaaggacaatgatattacttcaccaaagaaatctggttgtccattcggccacaataaaccaaaagccgaagttctaaagcctgataccgaggccccctggaacggtgactggcccaagacctggcccaaggaccaggctgtcgcagatcgagtacctgcaccccaggcccatgtttccccaactgctcctgctcctgcgagcgaggactcgactacgaaacctggcattccctcaacattctcacccccctcccacgtcaccttcaatggccctgtcttcttcgggtactccgccgaagagactgccaaactattgcagcagttcggcaacctgggcaaatcatgaccgcgaagaaacttctttgtatagtatgaccatggaaggcgcaagcttttaacgcatcacgacgaaacgacttaatttttttagcaagcattgtcgttgtattacccaattgaacttgatttgatataaatttcaatccattttccgtaacagctttaataacaaaattcacaatgtaaaataaatgaatgacttcatcggagagcgtcgacgctccccgagggaaactcgcagagcggggcaccttcgtatcatcgcgaccttcataacttcctctctccccgatgctgcgaactacttctcgtcttctatctctatctcgaatcctccgtccttcaattccagtcagacctcaattctcttctcccataatgtctgccaacatgtccatcatctcctctaaggatgcctgccctcgtgagtcaagccccgccaactatggctcctcacctgcctcctagacagagaaaacagactcaattccagaaaaaaagaatcaaagaaaacaaagagcaatagctaactcacacatccttagctgccggcccttacgtacgtcgtccttccctctatctgcctccgcagctcaatctaccttgagagctagctacccctccacaccggaccaatctactccaaaacaccatttccacacctacacatattgtaaagactataagtgaaccatctaacaaacccaactacagtcccaggccatccgcgccaatggtcagatcttcgtctccggccagatccccgccgactcctccgccaacttggtcgagggcaacatcggtgcccagacacaggtttgctgcgataacatcaaggctatcctgaccgccgctggctctagcgtggacaagatcgtcaaggtcaatgtatgtgtttccctccaggctttgttactgtggtgtttctggactcggctttgctagggagaagtatacacaagatatgagaaggaggacgctttgctgatctttattcttttctcaggtcttcctgactgacatggccaacttcgctgagatgaatgctacttatgagaagttcttcgtccacaagcctgctcgtagctgtgttgctgttcaccagctgcccaagggtgtgcctgttgagattgagtgcattgctctggagtagatttgagaatctatttagttttggtcttacttctactcgagccatgaaaacaaatataaagacagtttagtataagaataaaaatgagaatgaattcgatcgaattatgttgcgaaaatcctcggggatatcttcatcttgattatttccatttccgatcccgtttctctcgaggaacatacatgcgcgagtacaagcagatgccaaattgggaatcataagagtcaagggttcatgcgtcatgacacagaatgcaagagacgaaggaaatggagaatagggaagcaaaaacacacaacattactggcttgatggatgaaaaaaaaaataagaaacataaacgtcaaaaggtaggaggggagagcttgatagacaagtgcacattcaccggccacgggacatgataccgctcatgcggcttccggcaccggccatcaggctctgtttcacgatagcatcggcggcggcggcggcagcaagtctttccttctgacggctacggtcgcggagatagccggcagcttcggggcgcatgcgaagaatgcgcaggatcatgtcgtcgttcggatcagcctgcgcctcccgtcgcttctcttccttggccttcttcatcgtgcctaggttgcgggaaagcatgatgctcttggcgcgacgggcagcaggaagaccaaagctgccgtagccggcacctgtggcgccgagatgaggaggtgcagaagtgcggttgcgggccgcttgttggcggttgacggtcgccgaggccatgcgttcggaggtgcggataaggtgctccgttggttcgaagtagaagaaattcactgactgaatttcgtggtatttgggcgatttcaggatatcgattgggacgccgtttgcttcgccggtttcgtcgtcaaccgcatggaagaagttcaatagtagcacgagccagcgtgatacgatgtcgacttcttggattgttaatggcttctgatgggagggtttatccgacaggggcggtacaagtagactctcgatagtagcgagcacttccttccataggcgagccatcaccatcttcatggcttctggtgtgagggttttgttcatgatggcgaagttgtcgttgaaataattgaacagaggagtcagtgcattttcgacatctgccggagtgggtccggcaggagctggctgtgctcgattgcgatttaagaagctcgagacactagatatactgattccgcgagagagcaaagacttcagtgttctccgggaaagacagtgactgatgtatgacgaaagcttctctgtgatctttcgagtcatatccctttccgttcgtttgagtgtacggaaagccttcccgaagtagaactggatgtcgtctcgctcgccttccatgctaactcggagcagaagccgaccctgggtatccaggtcgagccaatactcccttggcaagaagtcactaaagtgcacaggatctagcttgatcgacgtgcggccaacgtagtcgtgatcgcccactgcgtcccagtcccagatggtggcgataatgttcagagggccctgtgtggtgagatctactgcatcctcccatcggggattaagattgttgtagatgattcgggttttagcaattcgtttctgatactcgtccgtcaatacgacatatggatcgctgccaccaccaaggtcgcatgctttcaagtcctctgcctccactaccttgattgtaaagacataggtagtagacttgcggaccttcttaagctgcggtggagtattccttgcaatgacttcggcgcacgcgtcgacgttgatgtccttttcgagtttgtcgagctgagcaagtgcatactcaatattgttcagtttcacaagggactatggataatcttagccgcgatattttacccagttgaaatgaataagaacatacctcagaggagaattggaagggctcaattttatccttattcgtccaggtgtcttttgcgaactgcatcagtttttcctgggtggtttgattcaatgctgcctcctgctcgggagtaagacgatccatttcctgcgtgaacatcttctccaaggagtcacagtatgtcgccacacctttcccaattgaattagagagatgcgtcatgaacttcgcatattgaagatcatcgtcccactctagttgcaccatactttcaataacttggttgaaagatcggaaaatgtcaatgactgacacactgtgacgatcgtcttcaggcgcaagctctgttgttccacctgaacgaatggcaaatacatcttgttttgtagcttcgctgacccaatccatgatcttttgatcagtcagacgaagccatctccagacgaagtcctgaaggagactttccacatggaatgggaatggagcactgagctaagttagtaatttcacagaaatagcaggggagtccaggggcttactcctcatgggtgttatggaataaccgtctgatagtagcgaactgtttgtatagatcgaagccgtcgtcaattgcgatctcctcacccctcgcttttgcctgctcgataatcctaataaccatttcatgtgcatcctcggcgaacatagggaggacgttttggcacaaggtggtaaaggggttcacactaattgtaagttaggaactgatcagccaaacagacgggaaagagcgggaaagaggaacccaccccataatctccggatttttgcggtagcgtttttgaatctttagcgcaagttttgagattgcatctccaagttgaatgacatggtcaggatcccaggcctcttgttccacagggattatttcgctaagaaggctttgatactttgttgttgccttttcagcaagtccctcttgcacgtaagtgctgaaacgattgatgtcttcagggtcctcaatgtagttgggatccatctggatgtgggtgtcaagaatgtacataaccgggccgagtgggcgtggctttgcctcaaagcagtccatcatagcctcatatagctctcggagcaaagcctcatgaagtttagacagcagcatttgcatcgtttgaagatcctggatagtccatcgttgtcgatcaaaaaccgtggaagccacaaagctactgcgtctgcggttctcgcccgaaggcatttctttcacaaaagtaaatgccgagtcaagggtagtgagatcgatttcattatcgacaaatttagcctgaaccacctcaaggaacaacacgacccgggaaaaggctggaatccgccagcggagacatatctcattaagcagttccgtagactgcttcgatagcagtttcattgaagggacgtcagatgtagcctgcgtagcctcaagctcccggtcccgcagatcatgggtcaaagtctgagacaagatgtatttgtacaaagacctagggtcagacgggatgaatgtgtatgtatcggattcgtccgactcttcaagagaaagcccagtcaaatcaataggttgatcaatgacataagatgttctgtcagtccgaccagacgttgttcttgacaggtcgaggttttcgtggggactcgaattgaactgaggaatggatccgggagtgcttttggctaactcggggttggattgcatgattgcaagcatcatctgtgagagatcagggccttcgctctttttccagctatcataaccctcgtccgactcaaaatcatcccttgacaatgttttgtgtgtctgaaggtttaggtgggcttgataggtcttaaggtcctgcagggcggccttttcagtccaggcggacttgtacttatcgatttcggattgtgcctgggatgtggtcatcccaaagattttggccacatgttgcaccaggggcatatccttcacatcataactcaatgcgccaacactctccgtggtagatgtaggtccgttcgtttgcatgaggtcctgatcttgcaggagaagcttgttttctagcaccgtcaatcggttggccaattctgggcggtccttggaccactcgtgatctttcagggtgagcgcaaggagtcgaacaaaaagcgcaacgtgccgatcaaccatgagcttccagctgtcatcgtcttgctctttgcccttgcccagctctttgactgcgttggagtagaaaatcaggagcagatcttcagctcgtcggtccttctccatgcgttttcgaaaggaggcctccttcaggacgttgagaaagacagcgaatgtccgcaccaccaggtgatcttgatattccttccttttctccttccccatcaacactccagtcaaccgcttctccagctcggccacgaagccatggggaaccctggtgcttttcgagtctctgaccaaggagaaatcgctcattaaatcatgaatagaggtggctgatcgttttggccgcgccggcgcgacgggggcattctggatgcgacgagagcgagggtggaggagataggcaaggtaggcgacccgaatggcatggctgtatgccacgttggcatttacggggcggcgcctggatacagaggagttgcgcgaatggcgaccctcattttgaaggctgttaatccgtcggttgactcctcgggattgggtagatgctgtcgacatggagttgtcaattaaatccgtgaaacgttaggaggtgacagatagcgggggaccatggagaaagttgggaagcacttagcacccagaagaagcttttaaaagattcttttctttcagtccaaagtgaaaggccgccacaaagctgaggggtgaattgtttattgaagggggcgagtgagggggggaggtgaaacaaaaagctgccgaacgactgacgtacataggcatataggcagtcccgtcccaaaacaatgctatgtctcctctgactattctatgaggttattatggtaattttcttatttttcttttatatgcaagtgcttattgcatattgctagttcaaggaaacttgatccttgttctccctggatggggccacacttataacgctgcaagggtttccttgttatttgggaatatcaatattgacatcaagtcaaaagttacatctgaacagatatcaaggacaaggatatgcaaaagacatttaatttaaaaagacaaccccaaaggacatcatagtgttatctgaatataaagtccacaatgtcaaatgaatttcaatgcgatatatcgacccatacgacaaacacaaaagtgggttttaaaccaaattcattccgagcatgcgagcatgcggccggccttttcggggtttgatgaaacataggactggtgaatcgaccaccagtcctcaaagacgccgaagatagaaaatcgtactggtatttacacaaataaaaagagaaaccaggtctcaatcaccacttatcgccggacttgtgggcctaaatcaactggttagctctttgcccatgtaaaaggttcttgggatatcatgtccggtacatacaggcacagcattgggacctcccaactccttttccagaccatcgacgtaggccttaggaacactcggcttgtcagggtaggtaaggctgacaacaccaaccatgctaaagaaaacagcgacgaagcatccgaggtggaagaaacccttgccggccgagacgtggttgtattgctcgggactgaagacaccgaggatttcgttatcctcgtgcacgggttcgccgaagttgcgcttctcttgcgcatcccaccagccaccgtaggggtctctgtgtgcccgcttcaaagggggagggttggggtagttgttattctgttttgggggttaggttcccggatgccaagtagggaaacggcatctctgccatatggatgctatacctgtagagccatgtcatcctcaatagcacggagagctgggacctgggagaaagatgcgcggggagcaatagctcgcacggcaacttggggcaggcgccgggccaagatccgttgagacaacatctaagagaggaattggaggttagaaaggctggtacgtaattgaagaagataatatggatctaaagaaagagactcacagttatgctgaaagacaagcagcaaatcagttgtcagaaggcaagagagccaattgggtagagggggttgaatatcgatgatgaacggatggaggtttgcggaatgttgtggcctgaggcagacagtcacaagacttcaggcatccacgcgccggcgcgaccatgtaattgctcgcccgaaggaaaaaaaccactctccacgtattctcatcatctccgttgtttttccgtccccatccacgccacagcgccgataagcatgttaaacttcgtgtagtatctctactcgatagtccctatttgctgatgccaaaatcttttacgtcgactgcgtcattgttgggatagctggggtcacctgccgccaacggcccctgtcgtctgcgggtacaagtcatgcaaaacggcacctccaacggcccatcaccccaagatgaacgcgtaacgcctgtgtccgattccacacccctcaatgggtctgtaaatgaaaacctgtcagattccgccccccgcgaatcgattccttccgacccgaaagacgtcgaagctgttcatcaacccgaagaacccccatcgaagaaacgaagactcacggattcctcctcatcgcaacgttccactcccagaccaccatcgcctccttggaaaaaggctggctttgagggccccacatctttcctctctgaaggcaaacgtaggtcttcgcgaacgaacgctgtcccggtcgaattccaacctgggtcggagaagagacacacgcgggggattcagaacaagaatgttggcaggtccgctcgcgatggaagcaagccggctgcatcctcgccgctatcggtaacacagtcacgagccgacgtcaatggaaaatcgggtggaaaggccactgcaaatggatcgcctaggacggcgtcgcgcgcgacggccaacaagccgtcgcgtatctcacaaactccagcgccaaaaccaagtcattcacacaccaaatctcgcatctccgttaccattcctcgcccgtctggcgccaacgcgaacggcaccagctctcgctcgcttcgcgatcgcccatctctttcgaatgtatccaaggaggtcaatgtggattcaggtgaagtcaatatgaatgacaaggaaccggaacaaggaccagtgaaaattccaaaattgcgcattaaattgagcaagcccgttcttcctattcgacaccctggccacataccgcagaagaaacacacttctttcagagaatgggtataccaaaacgatacctcaaatatattgtcagaggacgaggctgcggtagaggcacgcaagagacatgaagttatgactgctgctgagcccggtggaccgttgagctcgcaagtctgctcggcatacatcacagaacagcaagaggaacctcccccacagtactcgcaccaggatcacttggtttcccacgcactatatttccagaagctcctcgacaaagaacacaaacgccaccggcaaacagccaaactgtttgcgcagtggtgtgctgacgcttatcggaaacgtcacaaggaccccgaagatattctacgcgagcaacaggaggagatgcgtggaaagcgcaagcagctatcaaaggatcttcagaagatgttcgacttgacccgtgccgatattgatcgggtccgcctagcacgctgggaagaagagcggaaaatggaagaccagcaggctcttgatcgcgctatcaaaaagtctactatgctcttcgagaagcgtcgatcggagattttgggtgaattgcctagcgatgctcttgtgacgagtgacgatgaggatggtgtatcaggcttctcatctggccccgacgaagaagacgagagtaacatgtcagattctgaatccggaaccgacgacgaggctaatgtggatgatgatgccaaattgactgcggaagagctccggctgaagtacgctaacttaccggctgacgactataccgaccggatgtctgtagcctcaggcagtacagcaatgaccaatcctaacgactccttggatcctgaatctcttttagacggcctcgattcacacctcaccccggaagataatcagttagacgatgttgattcagtgttgatggatgatagtgatgcctccacagatatggatgatgatatgggtgatagcgatgaagaggaagaagacataagtgaggaggagtcggatgaggatgatgagagccgatctggcttgctgggtttcttctcgaagaatgaaacccctataccaaaagagggcgatgaagcttcagctgtggaccacgaacaagatatcgatatcaaatcggcatcggagggtgaagatgacattgacttcgaagaagatgaagtatccttggttccaattggaccaactaccagcgagggcacgtcgatagaaggcacgcccttacatatcgccaatgcttccgaagcctctcctgctattggaggagaaacaccttccgttgatactccgatggcagaggggctcactgaagccgaagctgacgatgcagccactgctggtgtcgtacatgagttggagtctgtcaaaccagagaccaaagaggcaccttctgctgaaatcgcagatgacattgatcacccccaacatatggaagtagatcatgtccatgacggccgagcaagcagggatatgtccagtgagccatcgccgggaaccttcgcaacaaagccatcagagcccgaatcggtgtcatcgctcgagccgacaatcgaaaaggcattgcaaataagtcattcgcctgctctaggcttgcagacacccatccctcagatcctgcgtggtacactacgtgaatatcagcactacggattggattggcttgcgggtctctacaacaaccacatcaatggtatcctagcagacgagatgggtctaggcaaaacgatacaaactattgcccttcttgcccaccttgccacagaccatggtatctgggggccgcatttggtagtcgttcccaccagtgtcatgctcaactgggaaatggagttcaagaaatggtgcccggggttcaagatcatgacttactacggcaaccaagaagaacgcaaacagaaacgccgaggttggacggatgacaactcctggaacgtgctgattacgtcgtatcaactcgttctgcaggatcaaatgtctctcaagcgaaaggactggcactacatgattcttgacgaagcacacaacatcaagaacttccgctcacagcggtggcaagcgcttcttacgttcaaatcccgtgctagacttcttctaacgggtacgccactccagaacaatctcacggaactttggtctcttctgttcttcttgatgccttcagatggtaccaatggtggcgtggacgggtttgccgatttaaaggatttctctgaatggttccgccgcccggttgaacaaattctggagcatggcagggagactatggacgatgaggccaagggcgtgatcactaaacttcacaccgttctgcgcccgtaccttcttcgtcgactgaaggccgatgtcgagaagcaaatgcctggcaagtacgaacatgtggtctactgtaggctatcaaagcgtcagcgattcctttacgacggcttcatgtcgatggcccagaccaaagagacgctcgcgtctggaaacttcctctccatcatccactgtttgatgcaactccgtaaagtatgcaaccaccccgatctatttgaaacccgacccgtctccacctcctttgcgatgccacggtctgtgcctatggactttaagatcaaggaatccctcgttcgacgacgactgctttttgaacacccactcaccaagattgacttggatttcctcaatctcgcacccgtatcacgagaagatatctcacgacggctagccgacgacagtatcaggctgatggctattggcccgttcaagactctccgagaacgccagtacaaccgaaccaactgggagatgggttttgatgggtccaacatgcagaccatcttagagtccttggagaatgcctgtcggaagaggcgaatggctgaattagagaggtgtctctacttcgaatccaagcggcatggtcgtcggcccgtatacggcagtagcctcattgaattcctccgggctggaaccaaggaacacgcgctatctaatgcaccactgcggaagcgctcaatggccgactggctgtcaagccggtcctctgttctcgcgtcgatgattctcactgttgaagaacgcgctcgtgagatgcatggctatgtccagagatttgcctgcgtcacccccgctgctgtggccgcgggcatgaatgaggctgccttgactccagtcgagaccaggcttttgacgaataatcgcccaaaccccccatacgatcctttccatgaagcacggatgcgcctctctattgcgttccccgataaaagattgcttcaatatgactgcggcaaattgcagcgccttgacaagctcctacgtgacctcaaagcgggcggccatcgagccttgatttttactcagatgaccaagatgcttgatatcctggaacaattcctcaatatccatggccatcggtatctccgactcgacggaactacgaaagtcgagtcccgacagatgcttacggaacgatttaatagtgatcctcgcatcctcgctttcatcctgtcgagtcgatctggtggtctcggtatcaatctcacgggcgccgacacggtcatcttctacgatctagactggaacccagccatggacaagcaatgccaggatcgctgccaccgcatcggtcaaacacgcgatgtccacatctaccgcttcgtatccgagtatactattgaatccaacatcctccgtaaagccaaccagaagcgcatgcttgacgacgtcatcatccaagaaggcgagttcaccacagactacttcaccaagcaagacgcggtcgaacccgacgcgcgcgacggccaagatgaagcaagtgccgccatggaccgagtccttggcaaccgtgtcgtcgggggaacccgcgtgttcgaagcagccgaggacaaggaggatttagacgcagccaagaatgcccagaaagaacaggagcacgccgacgatggtgactttgaggagcacagcgcctcgcacgggacaccggctcaggctggaacgcctttagccgtggaagatggggctggcgtgccggttccggagcacgtgtctgatgaccagctggctgcagaattgcagcctggccacatcgacgactatctcttgcgcttcatggagtggaacatgaaggatgaacccctggttctgccggcggataaaagcaagaaaaagtccaagaagggcaaggagcaccatctcaagaggcgtcgttagagttattgcgagatcaatgctcatttgcctcctttttggctccactccgcatgtttcacgtttcaatatttccctcacgttaacctgtttgtctctccggctatcagcttgttgtaatagtctctgtgtgtataatccaggcgttggcgatgttataatgttttatcattgtctttttttctcctgatcagctggctttattcataacttttaactctccttttcttttgctctactatttttttttctcccattctctgtgttaatcctactatattaacaaaagactcaatagaatcagttggcagaaataatcgtcacaaattactttcaaatcaatagtctatttcccggagattagacaagtggagcagaaatccttcctgggtctgcataggcagatcattttgttctgaccatataaaccttggatatttcggaggcgattagggtttagctcggtgtttatattaatatcaatagtgtgagagccggggaattgtctattgtattatagattgtggtggagtagagaaacgggatgcaacaatagtgcatatggttctcctatgttgtacctcggagatgttagagtgtagatcgaagatgtagatgtgaatatagattgtagtacaatgataatatactccatatatgcatccacagatctatcaagttgaagagaacaaggtcatctatggaacagaaatagggtttcccctattctcccgtctgatatcttcctccaacgagggtgcatggcccggtcgatccccctcaaagccaagtcacacctatctcggcaggttttctccgaacaaggataatattgaacaagggcgaccgcgtggttgaaggcagccatggaaagcaggaagtggagcctcattcggcagttaagggatacatctcggatacgattactttttgcacatctcgacggaagtgaaacagtgacacaaggttgacaatgttgccgagtattccccggttgtggacgttgatttgacgtgatttcacgtgttggagtccttggacttgttggagtcgggctccactgatcttctctccaaaagtctcccgaactcggaatggaattggcaactgtagggctttcgagctccgtactctattaagctttggagagtgcctcgttggaggtgcagcagatccatggtgatccggggatctgtgatttagtacatcctaaacctgatatatccctgtcatccggattaggtgattggtactttgaaatgccgtggatcgagatatatggcatttcgtgattggacggggaagaggaatggaaaaaaataaaacaaagagaatcagatgaaaatatgccgggcttttacagggcccataacccagcgaggtatttcaagcagtattttctttgtacaacatagggaggaggcggctgtagacacgtcaaagaagtgatcgccatttttagcttgcggatgagcaaatgccgatgtatccctgtgttggatctggtcttattgcccagtttgggaaggtagtatggaatatatcataaaacaaagaaatgatttctcgtatccaggagacttctagtcggcatttctccatggattctcattcccgagggataagaagctcccatgggttaaggatcctgaaccaacagccgaagccggacatctgcagttcgagagagatggacgtgacatatgcaggtcgaagaaacgcaagtgatgattggcacagactcgtgggacttttcatgcagctcgggcccgtgcattttctgatcctcgtcacgtcaaaatgtctctcatattctctcaatctcacgactagatgtaatagtgccatgggagatcccgtctaaggggggagaaactcaggatggcaccaacatggagcccaatattccactatgtattgaggacccgggaagatcgtcgccgatcaatttgccagatcgataggcgcttccacgaactggtactccacgggcgtcaaatcattggtgtgaggcaagaggggctttacactagttctgacaccatgtgccttagcggattcacctccggccgtaaaaaaagaaagcgctgctgccttgggatctgggggaggagatacgttcgaatagtgttggatctgaatgatgtgatgatcccgccctcctcgaattgaatttgcagcacataggttctaattgacaagggattcgaagttctcaacggtgctgcctctggataagacatctggtgtagaaatgtaatcgtcagtctatccatggaggatcccgaggtggcggtgatcggcgaccatgaggtccaagacgccatccgcgggtgagaggagggcttatctgggttggagtatatgaccgtattaggataaaactggggccggctagggccccaatgcacagtaaatcactcctggggaactataggccgtgttgtctttgcataaccgttgcgttgggatttcccccctcgattatcgtcgggcatgatcgggccaagggaactaggatagcatatgtatctgtgtatcttctcgatagatcgaatgttggaataaagaaaaaaccacaccatagtcagctctgtacggagtacaccgtagagactgaggtgattcatcgaattccgatatccgctttgttcaaacgcgccaagcactcaactggggatagtcagacataacagatgagctgttccgcttggatgatatgatccactcgaagtaatgacatcgccctgatcgtcgagacccgtaaccaatgatgtttgcgctgcgaatctcgttgatgatcgccgcgtgctggacgccacggacgctaagacccaatggatttcccccaagagattgtgtgttttagggttccataatgacagaaccaagacaatggagatgtggaggtgagaggtggtgagagggaagcgggtgaagttgggagatgaccttatattttaatgttttattttatttccccctaagctattcccccatttctacatataatacttgtctcgcccgtttcctgtctcttttctgttgatcatctcgatcttcgtactattccccccttttccacttcccaattggactgtgcgtcaataatgaagacctctatctcgtccgaggtatgggagaagaagaaggcgttgatctccaagttgtatatggaagatgaatggcccttgaagcaggtcatcaaacagatccgcaccgacgacttcaatcccaggtgagtgcaccatgtccgataccggactctatcatgaactagttaactaacatctctagtgaaacccaactacgaagcagactgaagaaatggcgagtgaccaagccatcccgccagactcgaaagaagagtctggcttcggcagaagacttagactcagacaaggatgccaagcgcaaggcatccaccatccaaagaccactgccatcattatcaacgagagaaacacaagcccgccatgaatggcccatgatacaacccatctacgcacaacatcccaccctccaacaccccgtcccagaccgggaccggaaatggagctctcctatgatccaacaactcaccccaagcccctccggcgagcacatccaagaccgcacgacagccgtctcctatgccgagcatagtccaacaacaacacccttcgaccaaacccacacctccccagtcggggagggccttatgctgagcacaacccccgccgtggccccatcctacccagcctacccactctcacccgaatcgggccttccaagcccaggcacggccacgactcccagcagcattggctggtcgccccgtgctgtcccagttgactacggcctcaacccacctcagtggtactctctgccctttgaaaccatccctcccccggccgtctctcagtctccggctgctcccatggctccttccatcaatggatacctccctcatgtccagctctaccatcctcagtattaccacggcgaggcagagtacccccatgtctatgattccaagaactggaagcgcactatgtcgttgcaatatgatatggctggccatctggctgcccgggccgagcacggagataggaagcagatgctcccacagatgcagtctcatggccagtggcatcctatgtcaccgccgcctactcagtccggtgggcctcattccttgatgtgtgctccggtcatgccttatatgggccatgaccattatgtgcagaagcctccaggcattggatactaggtgctagcttgcactggcacccttctttctgttaaatatatatgatgttttgatacttttttttgtgtgaactatggtggtggttgtttgttttgtcatacccgatatgtttggttttggggagttgaaaaggaaactgtatatcttgatacctattgattaattgagcttgatgcatcttactgtgtatattctatactatacatatctatcaaatctacaaataaagcagatgttctatagatgccaagacctgtgagttacccgggaggaacctcggcatcttgcggggaagcccccccatatcccagccatagctctttttatttgtgacctcccctttcatctctttgctcaagaagtttagaaactgccaactaaatcccaatctacattctcactactgccaaaatgcgtgccgtccaagtcagcgaatatgtcaaagtacctataaccaacctcaacctcaactccaacccaaactaacaacatactacagggccccctagacctaaaagtaacgacagtcccaaccccgaccccaacacccgacaaatacctaatcgaaatccactcggccggcacaaacttcttcgacatcctccagatccaaggcaaataccaaaaccagccgccgctcccctggatcggcggcgccgcggtggccgnnnnnnnnnnnnnnnnnnnnnnnnnnnnnnnnnnnnnnnnnnnnnnnnnnnnnnnnnnnnnnnnnnnnnnnnnnnnnnnnnnnnnnnnnnnnnnnnnnnnnnnnnnnnnnnnnnnnnnnnnnnnnnnnnnnnnnnnnnnnnnnnnnnnnnnnnnnnnnnnnnnnnnnnnnnnnnnnnnnnnnnnnnnnnnnnnnnnnnnnnnnnnnnnnnnnnnnnnnnnnnnnccgggaccggcggcgccgaattcgctggaacagtcctcgccgttcccacctccccaaacaaccgctttagaatcggcgaccgcgtcttcggcgccacacaaggagcctacgcaacacacgtcctggccgcagagcaaacactcctccccgtgccggaggggtggagcttcgaagatgcagcggggctgttcgtcacggcgccaacctcgtatggcggtcttgttcagcgcgctggcgtgaaggccggggactgggtccttgttcatgctgctgcgggcggggttggacttgctgctgtgcagattgccaaggctatgggggcgactgtgattgctactgcggggacggagaggaagagggagattgctaaggtttttggggcggattatgtggttgattacactaataaggcgtggccggaggttgtgaaggggatttgcaaggagaagaggaagggaaatggggctgctggagtggatattgtttatgatcctgttgggatgattgaggcgagtttgaagtgtgtggcgtggaatgcgcggttgttggtcattgggtttgcggcgggcaagattgaaaaggtcgcgcttaatcgggtgctgttgaagaatgtgagtattgttggcttgcattgggggcagtatgccaagtttgagacggagactgttggtgaagtttggcggggaatctttgaccttgttaagcaggggaagttcaagggaacggcgttcaaggatgagagctttgttggattggagagtgtgcccagagctttgcaggcattgggtggaagggagacttggggcaaggttgttgtgaatattgttggtgatgcgaagagcaagctgtagtctggagcatccaggactacagtagatagatgtgggaaagcaatatattgattcaatatagatataaactgatgaatgtagatgcgcaaggagtcatgctctcgtagacaaagtaaaatccccaaagggaaagactcgagcaagtataacatgaactatgaaggccctttgcttgctctggcaactttcgtatttcagaagtgagcatgaacacccgaaggtacccagctcgcaatccagctccagtcggtcacggctacaagacgtagcgctgtggtaactgttctccagaaggagagcccttgagcatgtccatatggactgggacagctggattgaggagttgcggatgacagcacgtgtctggggtttgatatatatctgtggttgggttagtgtagagttttgtattgataggcaccataaatcagaataacattaaattcagagtaatggtttgaatgtcgaaagattgtcgagagaatgtctaggggaagttgacgaaaaaaagaggagaaaagggaaaataaatggcgatgactcagcatgtctataccgcccattttctgcctcttagaggatatctgcatggaaaatactccgtactatgggcacagtcgctattgttccaattccaaatgaaatggatcgttcttcactactaaacctcaatagaccttaaattcttttttggtcagctacagaaatttccactcttgtggaaatttcaaagtgcaggaactctactattagactatagtacaagaacacttcctggagaccaatgagaagtcattatgtgcagaacccttgctaaagttttttgaccaattgacggtcttttggaaccctttaggctactgacaagtaagctatgattagaccatttcagctgtagccaagatgtatataatagccacaactttccacaccgtctttcaccttctttcatatcacaccttagctcccacgattttatgagcctgtatcattgaaaatccaactttgaacaatatcaaagtcaacgatggtttgtgtagtcaagatcctggatgatcctgtcagggactcaatcacacaagtggacacgaacacatggcttatcggtcccttcaaactctatcgatcaaagggatattccgatacatctacctggtacgaccaagaagacgatctcagttacactgtcaccaacgcacctatcggatctcattggtgtatgatgctggggatggctctgccgtctggtctgtaggaaacagcgcgttttgcaaggtcaaactatctgaaccgggtataacaccagaggcggcaatagcgttcgtcgataggctcgtctgtgagaagaagcctggtttcgaggtccctaagctcctataccaaacagaatacaaagaccggtattgtctgtttttaagcagagttcaaggtcgaactcttggagatgcttggccttccctagacgaaaaatggagacatcactacgcaaacgccgtagtggatgtgtgcaagtttctcgcgagtcaggaatgtgaggaatttcgtggtgtggacgggaagaacgcccttgagccttttctcgtcaaatccggcgcggaagaggaatactctcctgataatctccggcaatttgtatataaatgggtatggcctgctcaaaatttgtgttctaccatgccgacctcggtcctggcaacatcatagtggaggatatcccagaaactggcactatcgatgttattgattgggagcttgctagctattttccaaagggaatggattcgaaccaagtttcgactaagcagtggaatctttcttgaaaattcagctacggacaagccaactgagtggagatcaagggttagcgtgttgcttggagagaacgggttcgaagactatgcatcgcaatagttgtcccggtttaattgctagcgggactgccattctactatagacaagaataggtctgcatcaaatatcaaaccgggctttctcgcgcatgctcctgaagtcgtagctctcatagccacttgacaagtctcacggaatacatggggggtgtagatagtcagccgaaggcttgtaggtttgagttatatgtttccatagactaaagcaataagctgtctctacgtcatggatggataatattaaagcattcgaagactagcccctgaagacacgtccgcgtccctgcatcataagacaatgttaaagacggtgtccttgagaaggcgaaccgcctatacaaacttgaccaggaaattacggtcagtgtttcttaatgtgtagcagtcaatcaataagcaccccacaaagctactgagataccatctaaagaataaaactcatgggccgaggagcaaaaactctagggtatcttttggagtatcttttggagtataaagaagctacctcgacaccgacggaaccaggtaatcaaatcaccgagcgatgagacaagtcctgcttactcaactcgtagcaaataactacaggggtgcagtacaattgtcctacccaacaaagagtgaccaattgggtccttcttccaaaatccagagaacaagaacaacgttacttatatataaaacgaaaggatcagaactacgtcaaatccacatatacatacaagtcagtcaccacatgatcattttgcaggtaccaccatggcccatgaaaacatatggtttcccgatcctttccagaactgcaagatcttgagtctgaacgagcctacaccttccaactgggaagtctcccaaaagatcaacgggcatgtcgagcaatggaaagacgctacctgccgcctctcctctctggcctccgccaagttcgtctgtcgtgataccagtgaatctcccaatgggcccacagccatcctccgtatcgtgaagcagattccctctaccaaagctcaggtagccgaacaatatactccaaccgagctaaaagcatcccaagccatcttgctcaggaagccactcaatttactctacccgagctaatggcataccaatctcccaaggaaagaaattcgcccaacacccctaagctcctagcatggcagcaagggactcaggatgcctctggtaccatcccaggtggctttatcacatggattatctttgtggacattgagggaatcgcccttggcgatgcgaatggggctggcatatattgggagcagccgccggaaacacgtgcaaaaatccgcgaggtcttcatgaaggaatacacgtaagtcagccctataaaagtttccgtctaggaaaaaatttggttattcctgtttttggatccctcgacttggcccctatgcttgcgcatgcttgcgcatgcctcgttgaactcctgattcaaagctgtttattgaggaatgatactaatacataatgattagtgaagcctctgaaattggaatcctaccagtccatgatggcctggaaatttgatatggaacgaggagaggggaacgatgtaagtcttccattacacaatgcgaggatatgatgcggaccaggttgttaacatgttgtattcagtcatttcgtgggatttgaagacccagaattcttccagcgcaagggtcgggtgacagccaaaatattccctcgctataatctatctaagactccccctggtgaccggtggtgggaatatgaggtgaacaaagatccagatacctcgaaatggaccttctagtcaaactctttgtttggacatcggttgtcttcatattagcctcttcgttttcgttcttcggtgctgatgctcagagacttgaggtatcatgtgatatgagactattagggaaggcgcatttgagggcaagtgcctgttctaggaagggagtgggggtataaaagaacttctcccacctttcctcctcttctcttcttcccctccccatctctctgaccaccatctctccgtagccccatgagacagcgtaggcagagggtgccgtagcacatgctgcttaacctaccacagggatcataacattaccatgtttgttatgaggtctatgtaggtctgcatcaaataacaaaccgagctttctcgtggaagttcctgaagtcgtggctctcattgccatttgacaagtcccacggaatacatgtagatagccataaccgagtactcttaggtattcaatagtcatctaggcagtaaatccattacactcaaagacaatcagctttacggtagtcatattttaattcacacacatttgattcaattaatctatgggaaactctctgcaagatagcctaaagatcgtaaccatcaagggcataggtgtaaatgcagaggaagaaatcccaaacacaaaacatggaactgagaggagagaaagtagcataacatcatggtactcgttcatatcataggtagatgtcaaatgagttggcgttagtatcatcaatcccgtaaagcccatcacacttaatggtgccgctcacacatctcaacgacagtagtccaaccctcacaacaagaccggctcatattatgtccacaccagcagcaggtcaccttgcggggtagaagaggcgcaggccgtagatcgggcatgccttgggcagcatgtgcagctggtaattgaccgaatggcagagatcgtgagcctgtcaacttgcgggtaccggtgtcgggctgtgttttggagcgcgttcggtccactttggaatctgagaccagacgctcggggcaggcgagacgcgcgtagacttcggagggtaggtcgtgccagtacttgcagcggcagcagattacgaagatcttggtgagggtttgtgggctgtgggctgttttcgctttttgggatcttctcttgaggatgctcatgggagctggtcgggcttgggggctgccgctttgggtacccggggggctgctgggctgcatgccgggatgagtgccatattgagggccgtactgtatgccgcgataagtatcagggtgagacgcgggctgctggatgggctgcaagacaggttggttgccaggttggatacctggcgatgtgttgggttgaatgagtggactaacgggagcctcatgcacgactggcgcttcgacagcggaaattgcaggactagtatccacgcgattcgctgaatcgcgtttgaattcagagggttcaggtgcatcttcgtcggcagtgtcataatttgaatgaccgtcatgggaggagttatgtgaaggacagcggctatgtcctggcatgagccctctaggttctccagcaagaatattatcctctgggggtccggtggaagcgtgagaataccgacggggagatttcgcaggaacggtgttactatccgacagatccttggatgttcggctgtttctctcaccgggcgaaacacttcctgcatgtactggagttctgacgggtacctggcagggagacgccgggatgtctttgaccgtatcggttgacgcagttggcattccccgaatctcgagactccgtctttcactcttgactggaatcggtggcatttcgaccgactgcgaagtttcgtggaagttttctttgaaacggcttgaggttcgtttgggggtattcgacaaagcggtaggcaatcgacttcttcctcgatcctcgggatgagattgcccaggagagtgtaatggttgggatgggttctcatggttaggtttgtgtaatgtcagggatcttggaatcttgaaataactctgggccgattcatctgtatttgcaggattcaacgcgaggggagacgacttgtatgctcgcgggaagggatccactcggttcatcctggcaaggtttcccgtggagtttgtttgtgctaggctgagtggttggtaagacttggcaccagatagagttgacggattgtctggagtttctgggggtgtcatttcctgtaactgacgagccgtggtaacttgagtaggcgaatccgaatgaccgggtgaatataagttaggctggctcaagcattgcgacattggcatgctagtagccctgacagaacggtcttgacgagtcacacgatcaccgggatattctgccccgggcatactcttcctgtcatgcttcagcgctgcagaaaacagctccttatccagatcgccggaggacactagtgtctcgccgtttctagcacagtttccaaccacggaccgagtaacagtgggaatctgctccgacactgatcgattggattcatgtccatccttcgtcctccaggcttcggctgtcttccaggcttcagccatcttccagttctcacgaaggtcatcagacttcgccgtggcgtgcaaccggttgtgctgggttgggttggacattttgttcgaagcggataggttcagtgcggtgccatgcttggactgtagctctcgggtgatagccgttccaaacctttccggtagagtcaacggaagagatggtgggttcgtatctgtcctaagctggttaaactcggcagacggatcttgatcactcgaacgtgaattccggcgtgatcgccggaatatcgaggacaggctacttgacgatttcggacgctctgcattcgcactggagcttctgcttgagctgctcactggttgtttcttggtcaaacggcgagagtttctgtcatggattccgatatcgccctgggattgggattcctcgagtgctagcaaccgcttctcgagttcttttctctcggcttctaggcgctttgtgacacgcttttctttttctttcttcttgggtctttccaaggttggtttggagatattgtctccatctccgtcgggatagattggcaagggcgtcatttgttgggttggggtatcattttccacaggtgccccgtttgcgactgatagacttgagccaggtgtaccagtggagggtaaacgagagttggaggagtaagagaccgagctcggccctgtctcatcgtacaaggagtgcctcgcatgggaattactatcggtggcctcatgtgcgagagcttcgcgggcgagaaagggaactgggggaacaaatccactattctgattgtgtcgtttcttcgaggggtcaaatgagattcctaggctcctccatattgctgttgttaacttacatccatagatttgccaaagacgcggtggatgtggttagagatggatgatcgacgggccctgcggggtggatcggtggggaaggtctccattgcagttggtaaattggttcagttgactttgatctgaaaagaagcgagagacattgaactggaaaacagtccagaaatcgagggatcgtggatcgtggatcgtgaaacgtgaaacgtgaaatgtgagagatgtaaggcgtgagtcgtgaatcgcaagtcaagcagataaacaaaaacgagagacaaaggccaaggccaaagaacaaaataaaacaaaaaaacgaaagcgaaggagaaaaagaaagaaaagaaaaaaagcagcgatgatcagtcaagaagcaaaggattccaaatccgctagcattggctgcatgtgaaaccttccaccgagctattcttagtatttttttttggtcatctgatctgtagatttatagattgtgatgtatacgatttctatacaatcctatatgtaaatctataaacctgaagagaaccacccaaatctgcactcggcccagtggaattccaaactcatcgaattgtgaaactcaaagcgtccgaggcccaaagaagttggagagtcacactcgccccccacttcgcatcaacatcgaaatctcacctctacatctccccgagaacaactaaagatactctgcctaatcagccttaaactgctatcggttactcggtgctacaactacagagaatacaaaactaagaagctacacaatgtccaaccaaccccacaacgacctcccgccaagctatgatgcatcacaacaatcctgggggatctccggcactaagccacagacaggcccttcagcctcagcaaacccacctccatatcacaactggcaggaagcagtcccagacacagccacatttccaccacccccaatcaccggctacctaatctcaggcacagggaacgcctccgaagacgacgcccagcgcgcccacgatttctgcaactctgtgcccctctggctcccagctcagccctcgtcggccgtctaccacgacgtgcaggtccacgatcttcggcccgtgcagccagccgagctgcgtggccatgtctcggctgttgcgcgcggccgctggcgaggacacagtgtcgacgggaacggggattgtgtcgttcttacccagctgcccatgtatttccctgctacggactcgccgtttgtgcgcgagcagaagaagaccatctactttgaggttaagttgctggcgctgagggcggggccgacgccgcaggattgtagtggattttcgattgggtttgctgcgcagccttatccgtcgtggagatcgcctggctgggagagaggtggactgggggtgttttcggatgatgggtgtcggtttgtgaatgattcctttgggggtcgggactttacgatgccgttcaaggtgggtgagacggttgggttggggatggagtttgagctaccggagaatatctgcagtggggataagcatagtaagagctgcaaagtgcatatcttcttcacgcggaatggacgccgatctgagagttgggatctgcatgaggaggtcgatgccgattccggggatgttgagggcttggaaggggattatgacctatatggggcgattgggctgttcggtggcgtcgatttcgagtcttgtttcgaccctgcaggttggctatggaagccggaatgaacgtgtggtatctgtgaagggtccacgcgggccaggccgtagggctgaagtggttttgctttttacttttgctgtatggaatatggaatatggctttgggggttccaaatgcttagctagtatagcttgacgcaccaaatcaatatgagcatgaagaagacaaagaagtatgttgtacatataaaagccaagtaaaaaaagaaacacgctaaccaatatctataggctatgtagtttgcacagcctatttcaacggccaacgccgaggctgcatagcgtaaacgagatcccgcacgttcgttctagaaaggtatttttaattttcatttattcttaccttcggctacaacaatcctagtaaatgcagcgcattagtggccggggggatgcacgaggtgcagttccgctataacgacggtccttgcgacgtccgatgagtagtaggtgcatctctgccgcttttccgtatggtccccggtctaccccagctgcatgaacggcatgaacggcaggaaatcgttttatttgacgtcagggtgcgttgagcgcattgcgatctttgtccttttgcatgttgatgtatagtgatgtatattttggcgttgagacacgaggattagtttgagttctttgagcatatcatggttgatagctatgtatatagatatatacgtgtatatgtacgttacaaatgaaaagatatatatgggcagggcatggtgaggctgatactcgaaataaatatatatagtagacgcgacggtactccgtacttactccggacctcatacaaagaaaagagcctggagaaatgcgcactgacagcacggagataagcctgcgctcggtgctcttctaaattgtcctgttcgcgaacgatgcgtctgttcatctaattgctcgtatctgcacgtcaatgacggggttcatagcgattaatacgaaagagccgcagccaatccccgtccgagcgttacgatttgaaaagccattcaagcccagtgccataggacaatatttatcagatttattttgcgcacctatatccggatgtagcattaggctctagaaacccgttaatattattaaaatactcttgtacctgtatctgaaatacataaaaaagccagtggagcaccaacctcggtgataatcccgagactaccagccaccaagcccctattactgcaactaacccaccagggagcggctagaatggcacggatgtttccacttttggatcagaccagttataccccggctaagatcatcctatttgcacgggggggggaactacacgagctggagcggatcagcttctacagctatgccactgccggatatgtgtatattcgttgtatctttccggttgttattcggagtatgaatccggtcctctccttttttcttactgaggggtaaatatggagtagcagaatcacaatgggtttgtgtccaggtatctttgtccgatccactgaaaaagttacgaatcctccccccccccacagccgatctaaatttctgagtaatatgctaaggtacgatagaaaaagagaggaactagaactgaaagggaaaacagaacatcatccggcttgaaatggaagtggccgaaagggaaatttggtctgatcgactgcatgtcatcgccccttttccccgtgacagtcgaggatcccgtttggccccccccccacctggacatttatttgatatcccggactgacttcgggtctatgcgtcaaacccacaacacccccctctccctgtctttcacaaatcataacgttgaaaatgaaatagaaattcggccattcccggctgtcggtggagttggagcgggttcaatacattactgggagtccgtgcagccgagatacgcgtttgtttcactcaagacgtgatctgggcacggccgggagacggtggttattctgtacgtccatttcggctcggccgggagagtaaatggagaaataacggggacaaggtacgggatatgcatatgcagagaaccctagatggaactgctgcagataagaacaacgaaaagaaagacaaagaaagaaaaggaaaagaaaaacgtctgaattgccacttgtataaccgagagagaggtggtcttagccatttgccaaaagtaccagattgcgattttggacgatcagaccaaaaggatatccatattcggccgtatgcagatacattaattccatcatctccggccgtgcccccatttcgctaaggctggaacactttttagacgccaaagcgacaactggcgcgaagccagcggttgtctctatctgtgaaaggaaggagtcccgggatgtacggagtacccattatgatcccggttagggttggatatatgttgatacgttagtatacggagtactcggagtatacttagggatatcagggatattactgaattgcatagatattagattcctatgctaataagcctataccaatatgagcacggtccagctgatttcgctttcactttcactttcattcacattcctgtctacccatgaccacgagatttaccttcacgccaccgaggcagctggttgcccggcattaaacgcgcaatcaggcaatcgaccttcgctttcgtgttcccatgttttcccatgttcccccccccgtttctccgcctatctttacaagctcttagtaatgcctgtatataaaatccctccacacaccgggtattgccccaccgcgagggaggaacagcctgttacacgggcactttaggcgatcgccaccaggattacccgtaattttgttttttgttttttttttagaagtaggactaagttacttgctataataagcatttggcttcaagttacatccaggcatcctgttccgaccaatatgcatcttacgtttaatctattaatcttgaaaagaaaagaaatgaggaaaaaataggaaagtattccacggtactagtacttttgaatttcgactccgttctgctgcgggccacgctaattagcaggcatgtattgtcagaaagcggtaattgttccacaaatcacctttccagcaaagctataggaaattatttgtccaacgtaattatgggaatatataaatataaaaatagagatatctaggtctgtgtccagctatgagttccggtcgactgggcaccaatgaagggtctttcgagttccgaggcgaagagcatcgtgcatggccggatatgttctccattggaattgctctttgtgttgcctttttgccggtaaaaagaaaaaaaaaatagattgtttgtatggtacttagcaagaaagtcgttttcttagggttgcattgcttgaaagaacaacactacgccgtaccaggtatctcatatgcatccaacccaaaccgttgcctattatccacgatcttatttggatctgatttttaactaatcaagttagcatcaaaagtaaaacagaaaaggtaaaaaagtaaaaaaacaagaaaggtacatgcatatgttccccacaggggtgagcatgctcatgctcagcatactccaaggcgaactttcatttggattttgaatcttgatatattcggccacatgagatcaaagcgaagtatgtatatacactatacatatacataggcatgtgcaatacgtaaaataatcctctgcataggcctccaatgcctccacccatggacggcctctagatccagggtctctgacgcacgaggcaaaaactacctgcagcacactcaaaacgacaaccaagactggggcatagctttttagctcagctattttttttagtgtatgttgtatttacttttcttggattttataattcttttttataattcgggagattaatattatttctatattatcttctgcattttgtttagttcatcgcatgtgctgcctttcttcctactttaatctctctctcccttcaatcgtactcatctcttttttcccttttccctcttctcttttcctttgacattgaaggaagcattgtctccttgacattcgttaagacttgctttcactaagcctgccgaggcaattgaccaccggactgggtcaataggtatagcgcattgaatgcttatacctccgcatcttcaaaacgaagagaatcccccctgaaaatagtcagagatacgtggggatcaagtttcacatcatggcattcccgtttctgcgagcattcgtcacactcttgtaagtatagattgggagctcaatcagaccactagctaacgagcaaccagtctttatcgctacacccgactcgtgttcaacctgttttccttttggacattcaagccaatcccaccaccggagaatcccaaattgacatcccaagatgtaacggtgatcattccgtcgttggagggttgtggcgatgagctggtggagaccatccggacaattctcgacaatcagccgttcgaattgctcctggtgacaatcgaggccaatcgcatcaaggcccagcagatgctgaatgctatgccagcgtcaaaatcccgaattcgtttgtttacagtggagcaccccaataagcgccgtcaaatgacggaagctattcccgaggtccgaactgccattacccttctcgcagatgacgatgtgagctggccacggactctcctcccctggattctggcgccctttgaaaaggacgagaaatacggtggggtggtgacctgccagcgattgcgccgggccacggcgccgagcctctcacagcgactctggggcttcttgggcgctttgtacctggaacgacgcaacttcgactgcggcgcgacgactaatgtggacggtggccttccctgcatgtcgggacgaacggttgcgtatcggacgcgaattctgcagaatgaggccttcacctatgcgttcaccaatgaggagtggtggtgggggaagtaccaactcaatgccgacgatgataactttatcactcgctggatggtctcgcacggatgggaaacttatatgcagtaccacccagaggcggaggtgctgacaactctcgaggacaaccctcgtttcttgaagcaatgcgcccgctggtccagaagtaattggcggagcaatttgacttcgatgtttcacgagaagcacatttggcagtgagtgcaacttttcctttctttcctcttgaattgtcttaccttgactctcttttttttcccccctccctttgtttgtttttctctttgatcgggtcaaaaagagtctttttggtccgagtcttggtgtgacattggaaacaaagaaaccacctgggcagaatatgcagaacagagctaacatttctatagtcgtcagccctggagcgcctatgccgttcatttgaccacgttatcgccacctgcctttttgggcgacattctacttgtctggttgtgccacaaggccactggatcgtggggagagtccttgcacgatcaatccatgactatgctctacctctggatcttcactagcaagtggattaagctgctgggccattaccttcgctatccagttgatgtgctgttgctaccagtatccatcattttcggttatttccacggcgcaatcaagatgtacgccgtaatgacattgaatgtggtatgtttaattctttcatcttttgattcttttcatatttggcatttccatttccttttccctttttccttatctggtgcatatacggcaagtgtatccaagcgtagcccctctcctatgacaactcagcatcacagcgctttgatcgtctccttgcagctctgtttacccactattctcctatttccccgaattatttgaaattgcacagctctttgccgttctgatttgatctgcctttttaaaattgactatccgagagctggtctaactttgccttttttttcacagacaacatggggtagccgtgatggcgccgatgattatgatgccgagcgtatgaagaagcggacggatgccgatcgaatgaagcaaccgtactatccgcaatatctcattaaatgagttcttcgattttctatttttttttaccgaagatccatttcctgttcgctttcggggattggtctaccatgtccgattgtacaacaggggagaacttctagcccattgacttggccctttatatcatgacgaaacgccgtgacgacacctatgctttgttttgttctagatctgccctggttttttcttttttttgtcaaccctggccattccgcctgcccaagtcctcgagagtacgagcttcgaagtggtcatgctcttctccctccaacgaaccaatgggtatagcgtctttacttcttctgcccaatgtttttcctttcttcgcacatggttgcctggttatcaaaaacaaaatggtggtctcgatcgaggccttttccccttctcttcttgtaaattacaaaagcatgggcggatctcgttttgggaatgttctgtgacttctttgcgtttcagtttgcttttcagctttgattcccctgagtttttctgtgagagcttttgtctactctttttagatgcaaggtggtattctggaactttggttgtttctctcctgttttgctttctcaaactgcagataatttctaattgattggaatatactccgtacgcatatttgtccagggataggaagatatagccctaaagctacgaaggttgtacttcggcgaaataatggatgcatcctgtcatagttcctacttctggtgccatgcagatgattcggtctagaaccaaccgaaagagggttgaatgtaagaaaatagtgtcaaaataagctgatcattgacataggtacggagtatataatattcatgtaagacaaggtatcccgttcggattaagatgtggcgtggcgagccaagacttttcggaaatgttcgagttccaaacaactccaacttcgaatccaggaaccaattgtccctccaacccgcgctttcccaaatataatccattttcaagggcctggtactttgttcaagatggtggctttcgctcgcgctgcgctgtcttcgcagctatccgccgtcgcccgtccagtctcgttatgccgacgcatccactcgtctcacttcagatcagctgttgcacacccaatcactgctcacggccctcctcctaaagccccagagctcaaggaaaagtcaaaaccgaaggaggcggagctcccagcccccgagggtgaaggatcgcgatacaacctcaccgctgcgttgaggaagcggttttggaaagatgtccatgtgcatggaaagtcaggtatgaacgataaaggcattggctgtctttctcattgattgaccccgtccttcggtgaatactcatcagctaacccatatctagacgaatatcaagtcctgctggacaagcgacccgtccgaaccccgacgaaagaagtcctgactattccctccacaaagccccacctcgcccacgctattgcactggagtgggatgtgatggcctccgcccaggaggctcttaaaagccacctcatccctatgacctccctcgcagcccgcgccaccgatatcgcccgtgaagatgccgagggcaaaaacaccaccagaaaacagattctcacaaccgccatgcgttacctagatacggataccctactctgctgggagcccgagcgagaaatgcacgtgctggagcggacggcggccgatggaacgcccatcgagagtcttcgccagattcaaacgagaattgccggcaacgtcatgagctttttgtccactaaggtctggcctggccttgaaatcatccctatcctcgacgccaatagcattcttcctctcgcccagccgaagggtacgaaagacagtatcggcacttgggtttcgggactgtctgcgtatgatctggccggtctggagcgcgcaatcattgcttccaagagtcttctcattgcggtgcgcctggtggtggaatggagtgagaacttccgccatcttcagcgacctgagacgaagaggttcggtatcgaggaggcggctgaggcgtcgagtctggaggtgacctggcagactaaccaatggggcgaggtagaggatacccacgatgttggcaaggaagacttgaagcgacagttgggtagtgttgtgatcttggttagtggagagactcggtaagctacgagtgtatattaggtatactgtatgatagatatagatggcatgaccatgctttgtataaatgcgtgtattacaatgaagactaccatgagtttcaccatattctgtacaaaaattggtaacatactgggacaatgtagagatcgggtagggcttagtatggtaggtacgacaggtttgggtttttcgccagaaggttaaccagctgccatgaatcatctatacatatatgtatgtagcctcttaaataagcctcgtgatttccaagctctccgcgtgattgttctgtgacaaaccagcatggcctaggagtatcctccgacatggtgaggagactaaagaaagaacgaccaagaagggccaagttgttgatcaaaaggtaagtctatccatacctagtaggtgtaagtaatatgtcataaatgtaaagtctagctctgttataaaagccactttgttatcgtttttctggatgtctttttcggtgtcttttagaatataaccgctaaccatccccaattattgttagcaggggacctttgatacgagctttttctagacatttaagaggctacatacatatatgtataatgtgcaaccgatacggtattccgatatgtaggcaacgtgaagtatgttaacgacgtttgatttatatttcccctactagttactaaaagattgtataggttattttccctcatgaccatactaagaccagccaacgactatttatcaaacgaggcgatctccttgagtcgagggtggatcatcctaatgggctacttgagtttgatattgatcgtctacgagaatatgcaacttgtgccctctgtcgtatggaccttactcccgcgacttaaaggttctcatgcttagctggcttgtggcttctatcgagggcccgagggcgttcgacgatattcaatgacttgatgtttgcattccaacataatagtagaaatcgtaattagctcacttaaccctatgcattcttggctttgaaggcaagaagccctctttctatcccctgttctggcgtagcaattgattcaatgcacggttcctactatcgctatcatgtagagctttgccatctacaatgcgaattgggattgcagcctagacgattctatacggagaaaagctggttgttcattgacatatgagaatggtgtaaatgctgcagctgtactacttgtatctcccgttggacatcggatggttattgctaattgagcaagccaatcacttattctgtcatcatgaagctattcagagatcacttaactctgactttcctcttaccctatcctttgcatcactggtcaacagaaaatgtcatccaccgctaaggctcagtatatgtggatagacatgaaatactgaagccatcccaccgtgttggaccaaatctagcctactccctgcttttgcgactatgccctcttaaatgcgagagatcatactaaaagcataaaaccacgcagagggtaccctcaaacaactttcacccgaattcatcttttcgcccgagactctcaattattgcccgatatcgctaaacagattttagtaactaactgactagttattaaactaatgttggatgcctaatgaataaggcacccagtggggaacgaatatctttgtccacttcgtgctccgtacagagtagatagatctcccattctctctcttcctaccctgagaaatctgaacatggtccctaaaagccctcgtacacgctattctccttattcatatcgtactcagactctagagttaatcactcttctttatgagatctgcctaataccgtcgagcatggtagtaccattattaaaagcatagtgtagatcaggtgatctccaaattcatggtacggtcgtaaggcagatatcttagaccggaagaaatgctgctgacgcttaggcttgtctgtcagttcttctgctctaccttacttttcatagtggtgtactataatatatggcactcgtactgaaattaatatgcatggagacttcgcctaattaggttagaccgccgtactccgtagtaaaatcgagactcgaggggacccctacactcatgccaaggcggagttcagcaccatttgccccccaaaaaagggcccgaggccccctcgaatttcattccaagtcctcaactttgagcagacaacattcaatttaatgtgttggacatagtccagtgtgctccaagtatgtctgatatacctgaagagtaagtctttgttcccctcaggttggcactagaaaccctcgacccatggttcgcatcatgacagcggggataccttggcttcactgccttgatatatctgtcctgagcctgcaccctttgaagcagtaacatacggtgcccacagtgcaaagtgtacggattttacacacaatttgtactgacatgccactgtctcgcaggcacaaacacaaacgctctcgaagcgcaatagcactttccctcctccaccgcgacaagtccaaaggcgaagataaagatcccgataacaacgtagacaccaactcgcccacctccgcctcaccaagcccgggcccattgaaacacacccacagcagcagcagtcgccatagccgtcgcaaaccaggccaggacacaagttcgccacccgccattcaagaatccgccgaggatatggacacagtcgaagacctgccttccttgaatcaaatagagactggcagcatgtcgctcgaacagtccgttcgcacctttcgtctcttcgagatcttgcgcagcggcgataccaccgctatctccaaggccatcaaggataccatcgacccgcagggtgtgagttatctcaacggcacgaccgtcctccatttggctttgcaatgcgccgagccccaggtcgtggaatatgtgctgtccaatgcggaggatatcgatatcaactcgcgagatcgggatggaaacaccccacttcacattgctgcccagctgggccggggcccgcttgttcgcgatttgctgaatcgtccatcgatcaatgattccattgtcaactatcgcggtcagacgcctctcgatctggcccgtaccccggaaattttccagcagcttcagcttgcgcggtctctcttcatcgatagcaagaaccaggaaattcaggctttgattaaaaacgctgattataagggcttggaggctttgctggaggaacctcgagtggagggtattatggatgtgaacagctacgacctagttaccgacccgacgacagcccaatccggcggcacgcttctgcatgagggtgctagaagtaaagatgcgcagctcattgaaatccttctgacgcatggcgccgatcctttccgccgtgacaggaaggggaagctaccgcaggatgttaccaaagatgataaaatccgtgctctcttgaagagatcacccgctgctgctattgcccagcgcggtattcaggaaagggctattcttggaaatagtaatgcccaaggccttgccgggcgcgtttcgattggtgatgccccgcttgccggcaaggatgctcgcgaaatgagaggctatctcaagaaatggaccaattacacaacgggttataagttgcgctggttcgttctagaggatggagttttgagttattataaacatcagggtaagctcacggctcatcttcagtttcgcatcacccctcgtgccgtcgacccctgctaaatttctctatagacgatgccggctctgcctgtcgcggtgccattaacatgaagattgctagacttagcatggatgcgcaggataagacgcgttttgaaatccacggcaagtcgtcggtcaaataccacctcaaggccaaccatgttgtggaggcaaaacgctggttctggtctctcaacaatgccattcagtgggccaaggacgaagcgaaggaggaggagcgtcagcggtccaagaacgcagaagtgcttcgccaggctaagatcgatcacacagaaggacgtcctacagataccccatcagagtctggtctttctcacaagcctagcacaaagaatctcgctcctccgtctttgggcggtggtagcagcagtggcacaaggctcagtacatatgcatctcgcaccaccctagatactccagttggagacgaggacagctccatttatggcggttcttatgaccacgtccctgctccaaatgacatgaacagagtagtcagtcatgccgcatctacgccggagggggagggcgatgatgaagaatatatcgactatggttcaagtcacgataacgacatctcagccgctgataaagatgccctcaatatcaccgcacaatctgcgaagcttcagttggatcttcttgcaaatgtggcagcctcgctacaagccgagaaatccaagaatccgcaaatgaccatcgcggatccagccctcgaagaggcactcggtgcctacgaagccgcagtcagcagcctcaagggtctagtgcagaacctgctgaagatatcacgggaccgagactcttattggcagtctcgtcttagtagagaggagtccattcgtcaaatgtgggaagaaagcatggcccgcgtggcccgcgagcacgaggagctgcaatctaagatgggcgagtccgaggagaagcggaagcggactaagcgggctctgaaggaagccctggagagcgcaacaggcagtagccgttctatcgtcggtgggacatcccgtttgccaacagagagacagagtcttgaggccaaccaaattgaagctggggctaccgagacagataaagcagagcagcccacacaggaaccatccgaagtacccgaactgtctcgcaaaccatcaaactactccgagctcagcagtctctgcgattcagaatcggacggagaagaattctttgatgctattgatgccggtgaaatcgaggtagaggatgtcagcaataccaagaatatcaatatggaaccaccgaaagacgaaagtgctgagcttcgggctgtgaagagtaccctcatcgcaccatcctttaagggttacgaggatcccatcagagagcgacttaagatggatgctgatgatcggccaaagatttctttatgggtaagctgtgaagttagcttctgtttttttctttgccagtgctaaccacaattttagagtatcctgaaatctatgattggaaaggacatgacgaagatgacgctcccggtgtccttcaacgaaccaacttcactacttcagcgagtggctgaggatcttgaatataccgacctccttgacatcgctgctggtcgggccgattcaatggaacgcctggtctacgtcgcctcctacgccgcaagtgagtatgcttcgaccatcggccgtgtcgcaaagcccttcaacccccttctgggtgaaaccttcgagtacgtgcgtccggacaagggctatcggttctttgtggagcaagttagccaccacccaccgattggagctgcgtgggccgaatcgcccaaatgggactactgggtaagtgcatccgattttgtaggcgtatatctgttaccagggctaacccaaactacgtatatagggtgaatcctccctcaagtccaagttctatggcaaatccttcgacatcaacctgctgggcacatggttcctgaagctgcgaccttcctctggtggagaagaactttacacctggaagaaggtgacctcgtcggtcattggcatcattactggtaaccccacggtggacaactacggtttgatggaaatcaagaattggaccaccggcgaagtctgctacctcgacttcaagccccgtggctggaaggcctcatcggcctaccaggtgacaggaaaggtcgtcgacagcgaaggctctcccaggtggagcatcggtggccgctggaacgataagatctacgcccgccatacccccggcttcgaggcacctgtctccggccaggatcccgagtccgccaagacattcttggtctggcaagctcatgaacgtcctactggtctacctttcaacctgactccattcgtcatcacactcaatgctctcccggacgccttgaaggagtggctacctcctaccgataccagaaggcgaccggatcagcgtgctatggaagatggtgaatatgatttggctgctgatgagaagcaccgcgttgaagagaagcagcgtgccaggcgcagagaacgcgataccaacggcgaggtctacgagccgcaatggttcatccgtgacaagtgtcctgttacgggagaggagttctgggctcacaatggaaaatactgggagtccagagatgcgcatgattggagtcgatccgaggatattttctgagaggtacttgttaatttggcttggctgctttgtacagactctcaattgtcataaataaacgaatgaattctgaataactttctcgtgaatatggactcaaatgagtaaaatcgggtagtaaataatatatgtttcggtagagtccatctaatgaatacaataagcctgacgatacaagtttcatagatggtcgttatcagtcacgtgtcgccgcaaaaacatccccagagctatccgtggtctgatcggttcccctccacaaccaattgacatcgcaatggcaggatacacttgtgtccagtgcctacagaccctccgtaacggagtccgggcctcagctcctcaggctcgcttgcagagcctcgccaccgcgcggagaagaagccccatctccccgtcgttcatccgcagctttggctcgcaacgcaacagtcgatcgctgggcaactcccaggagcagccccagcatacccacagccagtcctgctgtgcttccaagtcctcgccttcgcccgtcgcgcagcgggcagctcacacggcaacctccgccgtcaaaactcggctcaaccctcgggccgtcttgaaacctgacaacctgttccactccttctcgaactcgccctcgccggcaattcgcaaacgcgctcagttcatcaaacagaatgccttctgcccccacccaagccaccagcagacccgcgcgcccgtctcgccgcacgaccccgaagccagaaaaaccaccgatgttgcaaacctgcccccggctcattcgcacttcgagtgccccgactgcggtataccagtctactgctccgaggaacactggatggatgacttcgaggctcacctcgagatttgcgacactctgcgccagatcaacgaggatgaccatgacctgaactccggccgctccttcccggaattcaattaccccggtcctcaggatgataacttcgttatcaacatgactaactgggatactttcctctatacccgtgaattcccggctatcaacgacgaccgctccatgcgtcaggttacccgcatgctcacctacccccagacaatcggcagtgtcctgcacgagcttagcccgtacagtgttcgttccggtggacgactcacaccggagggattgaagagtttgagtggtaagtcctgacttctatacggcagtagaggactactagcagcatctcccacacagcaaactaacccatcctcagccctgcgctactccctccaccccccgaaagctggcgaaggcattgacgtcaagggtctccgcctgaaggcgcctccagtgcgaatcttcatccttggcgcccgcgcagagtcctccctcccccgcgacgtctggctgcagttgcagtacatgtacccgcgcgccctgctgcacctgatcttcatcggaccggagagcatgacgaatcgagacggggagtatccgcttcccgagcgcacgcccgaaaaccccttcggcggtatcgtcgaggacagactcggtggccagatgaagattactacttacgtggactacttccacactatgaacaaggcgcagtatttcggccccttcgatccttacctggattgtttcatgctcttccaccctggtctgggtcacccggctagctcgcatgagtgggaggagacactgccccagttgcttgagactaaggttcccatcatctgtacagggtatacgcagtgggatctggagcgtgatatcaactgggtgagtgagaagtgtcgtggggagtttgatgtgcttctcgaacccggggagaatatcttccgcagtctgcgctgggatctgaatgatcaggatcctcatgatgtttcttgtggaaactggggattgtgggccttccgaggcaagaggtatgtggtgtcttttactgaatagagggatgttgactaacttgctctgcgacagatacgaagctgctttcaccaaggaggagtaagctagttgtgcctctttccttgctgtacgatattttttggtgcccgttcttggggtcattttagtagataaggttcagtttcagtcctctccgaagttattcacgattatcgatgcgcttgatttcagtcagttcgttcttgtcaagcatacgtagatgaagccgtagctaaggtcttagtgagaagctaggaatatgtaaagactaaacgctccgggcatagttaattgaagaaatattacgattaggcacaggtcaggggtagccgcaatgaattgtatcaattgcacaaaaagtagagctcgtcttacactcgttaagtaacagtagtatgacatccgaaggaaaagatgcaagcatcaatgcagggacagaattcaaggtcaaccaagacagaaaggaagtagcatcaagatagaaaaaaaatgcttggatgagatcaaaaggggagtatagaaggtaaaagaaaagggtataaacatcggaaaatcggaaaacacgtgtcaaaaccaccgtaaccagaaagcccgtaaccagaaagcaaggttttaaagacggtatgtcaagaagaaggaatatgtagaagaggaaaatatcccaaaatgaagacttgggaaggatcaagtggggaccattatagatgggcccgatgtgacgaaggtcgacaccaagattgaggggttaactcgaacatttttcctcaaacgagtcaaggaattgagtttagatcaagagaagaccagcaatggcgcctgcaccagcagcaatgaaaccagggaggtggatggaggcagcaccagcagtaagaggtgaaggagtagccgaggcactctcactggcgggggagctgctagtagccttgatcaggggggtggagctggcaatgtggctcatggaagggatgacgctgagggtgggaatgctagtgatgacaggcgtccaggtcgacgagggagcttcagtcgaggtctcaatgggggtttcagtcggggtttcaatcgaaaccgagctcgaagttgaggtcggggtgggggtcggggtagacgacgggggaggagtgtagccagagggcaccagagtgatggtcttggtgatgcagtcggctgtggcagattcagcggcgaacgcgacgggcgcgagggccgagaggaagaggagagccttggtgaactgcattgttgatgtttgttgtggtttaaggttatgatattgagagttgagagttgcgaattgcgaatgaagagtaatccgagtcaaaagagtgaatgcagcttataaaagagtgtaatagctgggagaacaaaagagtgacactgtttcaaacaggagaggttgcaaattaagagagaaagacaggggagtaaaggagaaggggtgtaggccaaggccaaggcgcttgttcaaggcgcttgttcctttaggaatgggccaggtacccaggcagcaaggcatcaaaggagtaagcaccaaggcatcaaggcatgaagggtccaagactagtccgaattaggtatacatatatactaaagtcttcccccttttcatagttatatcttctataaagactgaagaagcgggtgaatttacactattatcagacagtaaggccgtacctcctgttcttagcttcattgtcacaatctagattgtatacggagcacagtttcaggtaattcaatatcaccttgacattatgagaagcaaagcgcttatagatataaaaaatactgttgtacaggccaagggcaagttcccaaaccggggtatcaaagtaacagcaaacaaccatcccaatcatccttaatcatagcatcaaagctcatcgtcaacacaggccagatagggccataataacccagcagtcagaaagcaaaaacacagctgtcatttagaatccccatacggcggccactaccacagcaactgtcacccagtacccgctagcatgcaggaccattgcgacaggcccggatgccgaggaagtactagtcgagcttccgtcagcggcagtggtaccgttgggcaaggtaccgttgatgtagatggtctgggtgccgttcacatcgaccacgcgcacaagactcgagttcttgggcacggtgccgttgaagagggactcgtagtatgtgctgttgttgttattgtcgcagccacactccgagtactgctcgcacacacagacaacggggagcgactcgttcttgtgggcattgttattgtagtagttgtagtgctggctgtaggggtaggcgtaggcgctgtacagccaaagacccgggaagaaacccagtgcggctccaccgagcacgtagggggcgatgcctccagcagaccgcgagccagacgtgtagggagtgcgcgcaccgccagcatagtagttgcctccaccgtaggttgctcgagtgccagagccggcgctggttgtaccaccagcattgcttgttgaaccaccgcgactgctgccactgcttccactgctgccactgctgccactgctgccacttgagcccgaggagccggaagaaccagtgcggcctccactgcttcctccactgctgcttccactgctgctgccactgctgctgccactgctgctgccgcctcggcctcctccgccaccgccacgccgtttctcaagcgttataatatctgagctgtcctgggtagagtccagggagtccacatctcgttcaataagatcggtagactcggtttgagggatagtcagggataaggccctggtggaaagtagaaggagcgttgtcgcccaagtgaacttcatgatgaatccgggacccaagtatcgagtgatagaatagaagaatagagaaacagaagatctcgaagggcgtgagaatcaaaggaaagtccggtaaaagcgaattgaagtagagtcacggtatgacgaaattccgaggaactccgactcctcaagggatttcggagccttttaaatctttgaagtgctaagagtccttagagttaagcaattacagcatgaatcttaaaaagaaaattcatcaaagccaaaccaactcagcctcggaccctgaccctgacccgcacccctttagcggcccaagagcggaatacgaaaacggtggtgaatatttgcttggcatataccggtattttgtatgttggagacatttgtttcaatataattgtgctggatgacctcatggggtggctatcttccagtatacactttgcttcgcctcattctgtgagccctcgaagttggatattacttcatgcaatcttaaaccaacggcgctcatctgcgccccgtaaatggaccaagaaatgagtttctaagcctcaaagtttcgagaaaactctccacaacatataaatcctttgttatagagtaagatgaggccgtctggtcctatagatcaagacaagtgcgccttgtttcaatatttggcatttcagtggttatcaacttattccctttctaatttctataaaagatgattccagctttacatttgaggtttcatagccaatcaatagggcattgttagtagttagttatcaatagatagtcaatagttagttactacgtcgtcaaatagtgggacatcaccggtcggcacccaacagctttcgcccgagtcaaagctgcctttctctttatttcccccaagaacttatttccctctcatggcacgtcaaagaggtctttcaaatgcctcctccacttcatccctccccgaccaagtacaaaaatcccctattcgtgacccggcccgcagaccgctaatgcaatcctaggaattggggagcatgtatgattacctcgccaaagtcattctcctaggaccgagcggtgctggaaagtaggtatcaattatatcgatatgcaatatggtatatacaagcttagatcatcttattgacacccgatccttgtatcacaggtcttgtgtactacaccgcttcgtgaaagacgaatgtacaaccacccctccaacctcactctagctccccctcactgacacatcttctctccagggcgagtactctcctctcagaccatcggcgtggaattcgcctcgcgcatcgtgaaactcggcacgggctcgcgccggagacgcatcaaactccaactctgggatacagcaggcacagaacgctttcgatccgtttcaagatcgtactatcgcggcgcagcaggcgcaatcctcatctacgatgtcgcttcctacacttccttcgcttccctgccgaccttcctcatggacgcccgcgccctagcttccccgaacttatccgtcatcctggccgggaataaagctgacctgacctccgacgctcagtccgatttcgaagattactcccgcccccctccgactccaaccccgtccagtatttccagcagacagtcatctatcccttgggatgcgaatgggtcaattcgctcgactagcatgatgggtacggggactaggttgacggctacccgtgcctcagagggcagagaggtgagctccgaggagacatcccgctgggctgccaagtcgaatatacctgtcgctgtggagatctcggctctgacgggggagggcgtggaggaagtcttcaatcggctggcgcgtatcatcttgaccaagatcgagctcggtgagatcgaccccgatgacccgcagagtggcatccagtacggagatggaggtctgtatggcggcagtgatgcttcaagtatcagaagtcgggcgacgttggacgataattccgtgccccttcagcgcaggaatccccgtcgaaagggcaaggctcctggcacacctagctggaagagcgggatgagggaatgggaggatgtcttccgcttgggctctggaagtcgccccaatcaagggtgttgctagtattgtggatcattctacatcaccctgggtacatttgtttattttctgttttgatttggtctttggtttactacactgcacgataccccctcgttgaccttgatcattcaaatgtttctacatacttgttactttatttacccgacagctcagacctccaagaagaggaattaattgcatataaacttttgattcatctctcgttcaaaatctgcccccaaaacaacgccccgtcatccccaacgtttcgtctctcgatttatacatcaatgccagcaatcaaggtcttaatgcccttgccagccttgacctcaacaaaggccttctcagcatcctcgaacttcactgtatcggtaatcaacttcttgacatcgacactgccggacgcaaccagcccaacggcaagcttgtagtccccgctaccatatcggaagctacccttgatggtcagctccttagaacaagccgccatgatggggaatatgatctcgctgcggcccatgccaccctgtacgtatgtgcctccgttgcgcaggacatggatgcccgtgtgcacggaaggctcagcgcccgaagcgtcaatagcaacatcggcaccaaggccgagcccattctcctgtctcagacgctcagcgttctcagtggccgggacatttttaggcatgaatgtcgccgtcgtggcgtagtccttagcaaagtcaagacgcttctgttggatatctacgacgatgaccttggaggcaccgaacgcagtcgccacggcgcagcacagcaagccaacagggccggcaccgaataccaccaccgactggcccgggctgactctagcttggcgcacaatgtgcaccgcgacactgagaggctccatgagcgctccctcctgtagggagatgcgctcggggagcttgtagcagaagtcctcggggaggacatagtacttggccagggtgccgtcgtagggcggggtcgcggcgaatctcatgtgctcgcacaggttgtactttccggccttgcagggctcgcatcggcggcaggggatgccgggctccatggcgacccggtcgcctaccttgagggactggacggccgagccgacttgggtgatgacgcctgctgactcgtgtccgaggaccatggggtctgtcacaacaaatggaccaatcgatccttcttcccagtagtgcacctgttgcggggattggttaggctggtgggtcatactgttttcggggcatacatacatcactgccgcagataccggtgtacttgacgttgatgagcacatcgtgaggttctttcagctcgggaattgggcggtcttcaaaggtaaccttgtggacgccctggaggatgaatgagaggttctacatggctgtcagacttatcctgtacgtcattctcgacagtcctacctcaggtgtggccattgtgtatatttagaggagcaacggtgggaattccggggaaatcagcaacggttgggggatggagggaagagtataaggagttaatggagattctacacgcaagagaggaatatatatctcgaaaagataaagggatcgggagaatccagtcgaattgaattgaaccgaacaacgcagagctccccgcaggtccagacaagttccactatgtggatcagcctctctttctcttttagccgcgatattaaccggctctcggggcttttggcgggattttctttcctcgatgaagtcacaagaggcaataaacatcaggccatgtgacccgccagtggccgccacttttggtcaagtgacgtacttgatttggataactatatcttcaatacttcgtataggatacaaatatatatgtatggtacttgatataagaagaggtgatttagttcctaattaaaacaacacatataaattcagataagatactactctactactacggtgcaccttatgtagtattactataggtagatactatgtattccagggcttgtagacctttctcagccgaaagctatcggccgaaacgccaagacccggggattttgtccgtcctcaagctctctctcttccttcctctctcctctctctggtagcttagagcttcacttcttctacacattgcaatggtattcaatgccctcgccctcggggcgcgtagtcttcggactcgaccatcaccccgcctggtgcgccatttcgcagcttccgccaagcaagcaaaggaaaaccaatcattcaagagtcaactatatgaaagcacccagcagcgcttgaagcgcgagcgtgccgaacaggaaaaattcgcccaatatcagactcaatctcccgcgggtcgctctgccgctctgatcttcggtatgcaaagctgagataacttacattgtcctctggatcggtcagctaactagacctgcaattgcgctgtagctttggttttcttctcaactggtgcttactacctcggatccctcaagcccgcagctctgccaacgacatctacgactcccctctctgatatcgggcccgcaaaacacaacgtctctatctccaacctccaggcagcgtgggccgatttcgtcgagatcttgggcaaggaaaatgtttcgacttcagttggcgacgtggaaatgcattccggatccgattggtcctcctacacaccgaaagagggcgagaagcccttcttgatcctctacccgtcaaccaccgaggaagtctcgcgcatcatgaagatctgccaccagcgcattatccccgtcaccccgtactccggcggcacgagcttggagggccattttgcgtctactagaggtggcgtgtgcgtggatttccgtcgcatggaccgtatcttggcgctccacaagcctgacatggatgttgttgtccagcctgctgttggatgggaggagttaaacgcggagatcgccaaggatggacttttcttcccgccggaccctggtcccggtgcgatgattggtggtatggtcggaacagggtgctcaggaacgaatgcctaccggtacgggacaatgcgtgagtgggtactgtcgcttactgttgtcctcgccgatggcaccattatccacacccggcagcgcccaaggaagtctagtgctggttatgacctgaccaagctcttcattggcggcgaaggcactcttggtctggtaacggaggcgaccttgaagctgacggtcaagccccagagtgagaatgttgctgtcgcaagctttggcaccatccacagggctgctgagtgtgtgaccaaggtggtggaggctggtatccctgtcgctggtgttgagattctggatgatgtccaaatgaagtgtatcaatgcaagcggtactactagccgtcagtggaaggagtcacccaccctgttcttcaagttcactggtaccccgaatgcggttaaggagcagattggtttggtgaagaagattgtgtccacaacttcgggaaatagcttcgagtttgctcgtgatcaagacgaaatggcagaactttggagtgcccgcaaagaggcgctgtggagtgtcctggcgatgaagaaaaacccggatgaccacgtctggacaactgatgtcgcggtcccgattagcaggttgcccgatatcatcgaggcgaccaaggaagatctgaccaagcatggcttgttggccggaatctgtggccatgttggagatggcaacttccactgtaagttattgcctttatactacaaagtcgttggacatgtattaacagccgacagcgatcatcctcttcagcgagactgagaggagcatagccgagggagtcgtgcaccgcatggtgaaacgcgccgtggagatggagggcactgttaccggagagcacggtgtcggtctcgtcaagcgagactacctcgagcacgaggttggtgtaactacagtggacacaatgcgccgggtaagtcttgacatacattctcattcaaccccagactccaaatacacctttgtctacacccatggagcataccactaatactcatatctgcactagctaaaattggctcttgatccactccgcctgctcaattgcgacaaggttattcgcaccgaacaaccggcccccggagagatcaaggaatggtagatgcctcgcccttgacaggatttatatatccgagacactgctgaggctacctactccgaatccgaaccggaatggtgatgatggtggtgtcggcggtgtcgatgacgttcctcatcatcgctgccagagcccgaaccgtgtctggggcgctcctcgccttcatattgtcgttcggggcggtaaccatcaccgccctctcgctcaccatatccttcctgtggccgatagccggaattctcaaattcattgtagccaggctgcggtctaccatatccggaggactccctgtacatcgtggttaatatatgggactagccaataacaactgatgaagtcaacttactgtccatattcctcacggggaggtgggcctccatatccatattgtggctctgtacgctggtatgggccaccttggtagatttcccgtggctgctcctgatagtaactctgactctccgactggtattggtggtgctgctggcggaaattctccgctggaggtgcgtagccggagtactcatcgcgaggcgggggtggttgttgatagacagtttcactttgatattcgtatccgtcgggacgaggacggtattcttcgtggtgagccacgggctgaccgtagcctccgtagcttggttgtccatatccgctctggggttgactatatccgctctggggttgactatatccactctggggttgactgtaggagtcccctccatattgctgctggctctcatgttggggtcgactctggtaagaattcccgctgtcatagttttgaggctctgggctctcacgatcaggctttgagccgccgttgttgagaagcatagagcccatgcctcctacgagtccaccgagaataccgccaaatgcgcttcctcccataacctcggaggcaagattctcaatgccaacggagtcaccggacgcttggcctccaccagagctgccttgagccttgggaagagcgagcggcttgccacatccgtgtccgcaatcttgcacaccatctttatgattcctgccttcgaggacaccatcgcggctcagctggtcgcggaggacgtcacgctcctcgtcattcttttcgttccaccacttttcgaccgtggagaacatgatttgatgcatatcggcagccccatcatttccagactcacgaagagcggggtggtggaaaacaccagaaatgattctgtcaagagttcggtcgacatcgacattctcgtcgtcccagcatgacatgagctgaggaactgcccatttgacaaccgctgacgcaatacgaccagcgggctcattcaggatgtttgagaagtggtcttttgagagcattgagtgagtcgggtttgagcagctgtcgtcgttaaacaccacgtgctgttgctcccggctgctctggatcacctcggatgaaccggtttcaagctcggccttgacctgcttgatgatgggaaggatgtaaggagccagaatagagaagacaaaaatggtgatttgatcctgaatttgctcgatcaggtcgggcaagattggaatcttttcgatggccttgttgatttgtttcagcaggttgtcgtgccactcgaggactgggtagatctgcttctgggcgttttccaggtaaagagtccactcttcaggatcccgaggagtgaccttctcgccgtcatgtttggcttcatctgccttggacttgaagtcatccatcttgctggtctggtcggtatcaccaagcaaaccgtcgggaatcttgctcagcagagtctgcaggaaactctcggaggaatcctcattctccgattgggcgacgacagtctccaaggactcaatttcagactgcattgtcttatcggacaactctcccagcaccgaatggaagaaatccactccaccaaaggtaccagtcacgattggatagacttcctcatcgaccccgtcaacctgcagtttagtgtcgcgtccgacatgagggaagacctcggtctctcctagttcaatcaggctgagctctgtgtagttggagtgcgcagcataatcttctaggcagtgcaatccagtgcccaacagtcgcagagcttcatataagtcgtccttgttcctggattggccatagcgccggcccatctgaatcgagcggccgagaacacggcgaatcagcgcggccgagttgtcgatatcggcatcctcagttgcgatgtagcgtttcaagcctgtgtttcgaattggttagtccaatatcgaccaccgtgtgatcaaattccataccggtccgggaatcgactgcaagttcctgctcttcgtcaacgggaccacgtagtcgcggatcgtagtcacgcgcatcctctccggtagcgtatcccaagggattatcgatatgctccgtaggttggtaacatcccaggcgttcagtcgtaacctcaaactctctggttccgtatcttttataggtcttagcgaaaagtcgacagtctcgatatactttcacaactcacccaaagctcatgaatcccagcacccacagcaggatacggatggcttcggcactaacgtatttgacggtgcccacatcgactgcttggctgtaatcacgcagccaattaccgaagtagacccgctttacatccagcttgccgaatttcttaccaccggcgaccctcgccataagcagagtcagaagggtatcctcaatgtctccatgacgccagttttgaccttcgaggcgggaaagcgaggcgatgtttccagcgccaaatgcatatgcctggccggagaaagcgacgagtatcaagagggtcaaccccaggttctgcaaagacagacccatggttggagaaatggtacaatgtcggggatattttttatgcaaaagcaagggaagaaaaggatgagaagaaaagaagcgagagaaagagaaagaaacaaaaaagagtcaaccccaccatgtacaacacacaatgtcaaacacttggtgggatgaagatcatggtgggcttggctgcagcttggcggctgtacgtatacggagtacatgaaggtacatgcggtacatgtggtatatggagaatacatgaaagattcaagtggagattgtattgccaggtatatcgtgtaaatgaggtattagggagaacaggggcgataaaggaatagattaaaataagatgagcctaggcaaaaccgcactagcgcgacgaactatttcaaactaatcaaacgatcaaaacgaatcaaacgaactagaagaactagaagaactagaagaattagaaggaatcatccaataggaggccgagtgggtaatataggggaagaataggagaagtcaaagccgcatgcggtctcgatcccgtctgtctccggcttcaccgccgtctcctttttctcttcgactgggaatatatctactctcggttttttattacttcattacttcctttttttcctctctctggcttcgaactcttctactcatcggaccctgtctcaaatgccagatcctgtatcttccccgctatagagcgcttatctcaaatcttcacttcccccgctgatgtgctgatgcgctgatgcgcccctcttgatcaatcttgatttatcttacgattactcctcttttctcgcttccccactcatccttggcctggaatcgagctgtcatactctgattcccctttagctcctgtggacaatcatgcatcacgcgattcattactaaaagccgtgacttaagagcgttctgaccatggcacgcgccgacgattcatactcccgcgagtcggccttccctgtcatgaaaaaccgactggcgggtgaatctggatccctccagcgccctgtaaaggcgagaccaggcattgaaaccggacgggctacctcctataggtttccgcctcgagatctcaacaactcccaagatcaattcccattcgaggttgccgacaactcgcactcccctatcagtctcaagaagcgcaactccatggcttcaggcatggctatgcatggtaccacaccgggcgaacaaccgtggaattcggaacagaacatgaatatatcctccgacgccctcgactctcgccctcacaaaagcaaatcaataaaacccaaggtccacatcaagcccattctgcggaaactctcccgagatgatgcgccgtcgacctcgattgatttgtcccgatcgtccactgaacaagaggggctgggcatttacatgaacctcgagcgagagtgcccacgcagcgagcccctcgcaggtgtgaattttaagagaacatcctccggccttcaccatcgatcggccagtggaacatctcagttctcaaatggctcaggctccagtgcgaccaagcccggatcccagtacgtgcatcccatgcgacagacgcctcgagcgtacactccaccattgggccggtcctacgaggactcaaaccgggatagcgaagaactttatgaaagccccgagtcggaaccttcgtctacacaagaatcccgtacttcttcaggcccggcccttccccggctgtcattgcagattcaagaagattctttcactcggctccccggggtttcacagaccaacgtgaccagtcgaccgtcctttgggtactcgcgggaggcggatggaactacatccccgttgtctagaacgtctctcgacttcgttttccgatctcgaacccgtactagcaccgatcctatttcgcgtgcagccacagttcaggctgcccgccaggcatttgaggaaaaagaagccgccaaaaatcgacggcttgaaaaacaacagatcaaagctgaagagagaggcccccggcgtctcttgaagcggcacacgtcggaagataatgagtctcctgtgcagtctaaagaggagatttctgaaaagccccaaagacccgttttgcatgggaccgaagagccatctgcctcatggaaatcccaatccaaaagcgcatgggttctctttatgacctggcttcgaactagagtgttcaaactgcgacggaagattaagaaacttcgttgattctgactccttccgtccaggttttcttttttctttttttcctttgtcttttcctttgttccgcccctttcctttttgttccaagttcatacttcaatgagcgagcgatttgattgttcccctggtgttgatctgcgagtcttttttgcacctttatgggaatatcgctcaatatgagcagatacacggcgtctggattgctgtctttgcaacgtatgcgtttgccatctctaggcaatcgcaggtcgagttgtcctagagatattgacctagcatttccgagggcattttattttatgcatgggaaatgagaaatgtgggatctgcttccccaatggtaccaaaccgaattatgaaatgaaattcataccattagttattcaattgtgctttgtaaatgtaaacgtcagatgttgtcaatgttgtgtgaagggatataattgtagtcacgtgccaaactgcgctgtccgcgtcttccccaaattcccccgaagactacggcgcacagcagcgacaacaaccgcctgataagctccacaccttccagctctatctatttcttttacagacgcacctccacggaggggagcgtctccttcatcatggtgtacgattggtctggcaagcgggaaatctgcttccagatgtacattcaggaaaagaaggcgttagaggagatcatggactacatgcgaacttcttgtcagtttgcgccaaggtaagtgtatatgtccttgctttcatttgtaggatactaattgattttcatcacttctctagcaagcgtgcctttcagactcaatttaaacgatggggctttccgtcgaaacaaaatccagcacacaagaatattgaactcgtcgctcgagtcaaagagctttgggaacggaacacaagccagcgggatatgcttcgcatcttgaatgatgaaggctttgagattaaagagagggaattaatgcgagtacgcgcaaagaatcgatggctgctgcgagtccccaatggaatgaagtcacagtcgaatgtcgaggaagaagaagccgtccaaccggaagatgagggcctactcgccttgcagcaggaggtatacaaggtcgaaagcgtactcgataacccgcatcatctccctacacagccagatgaacgcccaaccaacgagtcccccgctctctcaccagaggtcatcgcaaaacgccaagagcgactggaacgcctgaagaccgaaagtgcagaacgttgggcaaacagaaaacgtcgtcgtcgaactcgaggatgggccgggctgccagctgaccctccggggcctccacgctttccgtcggagacaaccatcgacgagagcaagcagtatctcaacctagacaacaccatgtaccgccagaccagggaccatttccagcgaatctgcgaagaagcaggctttatcaagaaaaccgcagccggtcctgagagatggcaagctgcgaaagacaaattgatccaagaatccccacaccttcaacaggtgtttaatacagatcctaatcaacgcgatgcaaaggcccttgcactcgatgttgtgtgtaccgatgtcaccaaacgaatgcggactctggagagacgcatgacaatcgcggaggcgaagaatgccctagggatcaacccggaggaaagtcgacagattagaaatgcgttctatgacaccttgaaggtggatcatttcacaagcaagttagaggccggcgatgaacactggagagagctcaaagagcaatggattgcaaactcagagctgctccagcaaatcctcgcccctgggccagccgacccagatcacggcaacaaactaaaggctctggaagtactctgtcgcgatgtcatgaagagactccgagacgaccagacgaagcgagatccggcacgtaggagatcatcggcccgtgccgggtctcgaaatcaaaccccgacaacctcctcgatgggcagcatgctaggcaacgacatcagcaatggaattagtactttggcctctcaggcattggccagtgcacccattacggctactgatattggcgatatgcaaattgacccttcactactccaggctgcgaacgacccatctttctcggctaatccacaccacgacgcaggcaatggctttgaatatgtggatcctatgctcagttccgcactattacatacccccgtctggtgtcggattagcttgaaggaccagtcgcaagaaataatccgaaaaccctggctcgaaaagctagccacacgaacagtggaagaactccggcaattgatcggcgccaggtatccatactcaatcatcgcccgaatcgagggcattgacagggatgaggaagggaatgagcttctcttctcaatcgacgatgatcatcaattggatgcatacttgactcatgttcacggaaggaaggcgttgctcgatttcacctttggacagatttgaactctcggccctggtggcaaggcgtagattcggttgagctaaacagcgttattacccccaatgttaggataacaaatgaaatttactgtagggaataagataaataggacattcttccttagatattaagtctccagactcaaaggcgcattactagatccttaacaccaccatgacttgggcttgtgtagtaaaagataaatcatgaagtttttggggggtacctaagtgaccatatacatatacaacattgttcgctgttcacaattccaatgttcaaaaacagaaaaaaatccctatcaaccgctacacccgtgcaccgaataagaaaccgccgtggaccaaaaccatcagctcagttggcgccgagtgtttggaccacgttcctgaagaggaccccaatagcaggcaaggagaatgatggagtctcaccaaagacactagccagtcccttggtttgagcagaaaagtcctccacgtcgtcggattgagcgaggagcctctccggtcctcggtggaagagagttgccaatccattgtcgatttggccggtcacatcacgggactggttgttctgactcttctgggaagccttgtccagacagccaagtcgttgtacagttgccgtggaatcaacgacgatgtaatcaccggaataggcatctgagagcagcgcaaccggggagctctgcagggtttcctggaagaccacctcgaaggatgggacgtcgtagatcttgatttggaatcggaccttgcggcgtttcttgtgtgacgaactagtaacaattgccaatgtcttcgttctggcattcacggcaatgagctgtgagttgccgccgggggaatccacagactctgacgactgaatggtcttgacgacatcgtcgactgtgtcccagacagcgaccgagtgagtagaagcaacgatcaaatggcttcctaggaaactcgtcgagcaggggtttccaaggaaaacacccgtgcgtcggtagtgcacagagcagtttcgcgcatcgatcaggacaacaagaccatcatttgcagccggtgtcgacggcaaacacacggccaatactgagccatcctcggagaaacccatacaagccgcctccagaggggaatcttcggtggaattgagacatccccgcaggtcaacggtaccacgacacttccacgtgttcagaggctggtctgcttggtctttcaccttcagtccgtttcggtatttcgcagttgggcaccagaagcgcagaacagagtcggcacctagggttgcgaactcgtgggcaccaggccgggacaccagaccaagtacagctgagtgatggtttttggagaaatgaggaccgtcgacacgggtgaccagttcccatgtatcagaggaagcgtcccacttccagaacttcaagaagacctccggacggagggtggcggtggatttagcattagaagagcgatctagggcttccacatcccgaggatgaggggcccaggtatcaaccgtagccaaccacttcgcatcatgcactatatctaagtggttgatatcgggtgcgacaatttgagacccttcagggctgacgctcaaagtggtcgcattggttcgcgcaagggcttggcgggaaatattggagttggcacggatatcgtatgtctgaagcacagccgcgtttgcaggctgagagccatgctggttttgagtaagctgatgggaagctgggacggccacaatcaatcgctctggttgctgcgggtgcaatttcgccacaacagatccccttgaggattccagagagccagacatgtctgggcacaactgcaatcctgtgatggtagtaagaggttgcaattctctcgtcgacaggatcatgactgaattgtcggccaatttaaccacatacgagctgccactggcggatacgacaatgttgcagataggggaggaaagatggggaaggaattgcttccggccagtgtccaattgccagagaaccatgacggactcctgaccacccgaaataatgtagtttcctgatgaatgtgagcaatctctctctgataaacatgtgtataagagtggacataccgtctttagaccaacgcacggtgttgacagagccgcggtgccaatgcagctttctaggcgaagacttcttatcgccgagatccttgccgaagaggacattcaagacattctggtacatcagtatagaaccgccgctctctcctactgctagatcgatggattccgagccttgggcctggatgtcaaagcaagtgacattgacaggaagggtcgcctcgcgccaggcgtattggacagtctcaaggttctcgagctccgcgctggttgtagtacccataaagagatgcttaccatcactagcgatgatcactcggccgtcgtgggtgaccttgatgctattgattttctggctggtctcgaggacggtggtgccttggatcttattgtcctccagtttgttgatcaaaatctgcctttttccgtccctttgcgatatgaccgagaaggaagtagcagttgtgcttccttctttccccaccgaggccagactcgttgaaacggctgtgcaggtagtctcccagtgtgcgatgcgctttccggaactccaattccacttgctgatagagcccgaagacgtaaagatatagaggctttcttggtcctcgggacaaaggccgaacccaatgatctgttggccagcctccatttgcaatgtacgtgacaggcgagaggttgaggttgcgaatacttgaacggcggtgtcgagtcccacgaggagatatctgcgatagaaaaaggtcagaatgcgtctcactatctgtcggcagaaacagtcctcacgcttcatcatcggtcaaaattggatctaaattgttgtaacgaccgccaacagggcgcgagaaagaccactgcgcggggcttttttgcttaatctcggcatcttgtatctggacatcgccattggaaccctgtttcacactatcggttggctcgaccgtctccaggctctggttttcgttggctcctgagactctacgccttttgggtcgctcttcatttgaccgggcgagcttctcggaggccgcatcgctgagccgagatcgcttttgctgtcgtgcggactgattggccgccatttttgcagatgaggcaggatcgagaaagagaagaaagaacgttcaaatgttagctagtgcgactcagacaatcatagctctcgcaaattgggacacagttgcgtagagttgagtctggggatattcatggcagatccgtctacttttttttcccaagggaaaaataaggcggggattgctggcagaaaatggaagttctcctgattgggttagatcggccttcaatcttcgcgggaaaaaaagtctggctcaaagcgacattattcacctccaatcgaatcacctcctaagctgaatcgctgaaatgattattcctgtccgttgtttctcctgtggcaaggtgagcagctgttttttgagtgcgtgatgtatgatcatttgctaaactcctgattgtaggttgtcggtgacctctgggagcgttacctgcagctcttggacgacggtgttccagatgggtatggcagcctccagtctatcacacctgtccctggctaattaactcttttacagcgatgctatggaccagcttggctgcagacggtactgctgccggcgaatggtcatgacccacgttgatctgatcgagaaacttctccggtacgtctcttatttcgagattgagtgattgttgctcattttgtacagttacaattccgccgagaaagatcgctccaaggctcaggtataggccaaccaatctctcacacgaactcgaaccgaggctttcctgtcaaaaaatcacccgaataccccattatccctaccgggtcgtgctagcccgaccgctttttcacgttcggctaaaagatattgggagcatattgaagtttgcaaaagaaggaactccagcatcttaagcttaatgatgtggtcgttggtgttggctggtctcaacattcaaatgctgccagttttggatctccctggggcagtgaagtggtttgagatgcgacgggtgacccaggctccaccggagatgggacgaagttacccacaggtgtttcttccggtatttgcatttagggcggcgttgcactctacacatatggcgccaagggaggtatctgcgttttggttattactgtcttcaatgaattttacagctcagcggtttgcaatctgacccatcaaattgcaaaatcaccatttgtagctcaacccaagtatgtgtttaaacgccactgcttggtttgtccttcgaggaacgttgggctgttgtggccgatttctctcgtgcattatggccctctgttggctagaagtgtagtcgttgtcagacttacagagtgaattgattttctggcatactcagatattaggaattgccatgttcctagcagtgtacaacataatattactccggccaaagtatacattgaatgtctaacccgatataaacgggcaaattccccgcttggacgcctccgatgatctcaacaggtcgagacctcattctagatctgcagtatacccaacatggatttatcagtcccgggttgacgggtatgaactgttggtttctacgattttggattgatcttgggatttgagaaccaaaggcgtctagatagtccgaagaacgaaccaatcctgagagctacaacttccaactcataaatctctacccgagggggccaaataggcgccgtgatgaacttgcatctcaacctccatcggccactcacatcgaggggagctgcatcagactataccgcatccaggacaaaagcgctttcatcgatttcagccaatcagagagcgcagatgtattacaataatagctatacaattacttcacagtacactttccccaatgcctttctttctgcagttggttcccaattggcgcatttgcatattgagacattgccaatgtgaaatggggactccacattcattaccatatctgatatcccctcctcccatcctaaccatccaagtatgaatatgtattggagaaacagatatcacgtgtagtatacgctaggtaagcgatgagggaccgggcccagctccctcaagtattgctccccccatcttttttttgctctttcactcgagctttgttttcttctattcccgtatacattcggccatggccgttaggtcgccgctatctgtcttaccataccgcgtcaacgccgcaagtccggcttactgttccccgcgctcggtttcaatgtaagaccagtactggtttctctaagaccatcgctgatgcgtaaacaggtctcttgacggggtcctcgatgggaatgagaatccccgcctctccgcctctgagccgataagcagcttatcaggggcctcggccaatgaagaggatggcgatgattgtgatgattgcgacgattcaaatggagaagataacgctactgaacttatacgtggatccgggggcccttctcaatcagggcttacagtatgtgcgatttgcgggctatacacatttcagttggattcacaccatatagattcaaaccgaatacccaaatcattcgggaaacagcacaacatcggacgacgatgaacctccgcagtcggtgatacatgctccgccaggatttgctgattttgtacgaataccatcagaactgttgccgcgttggctaacggtgaatctatctagacgtcaatacagcctactcccaaggacacagaggagtcacagtcgccatcagtcggtttgaatgagcaaactgatgtaataaatgtgcctacaaggccgagaaaggtattttcatgatagccctcgcccggttatatatggcgctgatgagttctatcaatacagttcggcaatagtccaatatcgccgcctccattgacaacatccctcagtctcgacaacgattgtaccgagcgagcgacgccacgtgcgcaaacaagacatgagtttgaggaattcgagagacgtagtactcgttcgagtagcttacaaggtatgccgatttttttcaagtcatactttcatccatgatagcccttactgaccctttttcaagatatccccgaaggtataaccgtgaacgaaacgcattcaagctctagcatacaagactaattttaatccaggactaaccagcaaagaggccgaaatcaatgccctaagagctgctctcgacgaatgctggacactgtgcaatacgctggccaatcttagttatatccatcgaaaacgtctcctcaaaccccaaaattatgatatgcaagaggatgcatggcggtcatgttggagactttgccagaagctttatgacacacgcgacgacgactacgcgtcacaaatccttccgactcttgatctctgtcgagatttctgccaggcgctatttgaggcccgtactcgcgacagcgacttatctgactcggtcttgcgagtgagttttgaattgaacaatcatctttacaacactcacgatcggaaccttcccgatgccttccgtgaaagaactttggatttctacattaccttgtgccaccgtctcatgaagcagcgcactcgcatcacggagacagactctctgctgggtgcatgttggacattagccgagatgctgttcagtattcgccagagcaagagagaagggaagccgctggatgaggacttgctagggtctgcagttcaagcctgctgggagctttgcgatctgttccgcgagggttggaccctccataatttgcgcaactcggatcggggaacaccccggccgagccaaaccacgttctcgcaggcattccatcaaacgtcgcaacagtcagagctggatttcggtgatgacccaatgagccaacttggcaaccccgagactccaaccaccatattcgaggacactgcaacggcctcgcccgacgacactccgattccgaatatactcgtattgggctatgggaatgggcataataacgctcatactaagtggtcatccaatgcatccagtatttcggagcagtcccgatcatccgatcacacagcatcctcggccaacacagtgaccactgtctcggaggatcccaacctcacgcgattaaagatcctgatcaccaaagctgccatcattagtggatatcaacggggcgggagccagaatctctcatcttttgtgaaatcactaccctcggatgcgtttggctccgcggcctggcagacatcattattgaagaattatagaaaggtcgtggcatttgacccggcgttcagaagtgttggtctgcaagcccgggtgagtgccattgatgtcgcgcatgcatgccaggcaatgctgcaaagtggccagtactcctggctgcgtgacctctaccggctcgtcttcgggttccatattgaagaggcgatgggccgtaaaggtgtgattatccaaacatagcactcagttccatcatatgtcgctatctagtactttttctgatgagttggcatattcaacgcggtcgacattcgaagtggggagtggggactaggtgactcttattttgtacacaacaccagtgatcttgtattcctcgtggaatattcttccctgagtttcgttggagttggggctgtgttaaggtccatttgtcaatctctttttcagcctcttttacccaagataaggcatagcaggggtatatatcaataatacatcaatgtccgaattttggcccattaaggaatcactgcttgaaacaaggaaagaaaaaccagggcaatataattctgttggaccatatagatatggatatagatatacgtagtagaactatattccgtaccaacttccctagtcaccaccaaggaaaaaaacgaagaatttcattctcagccaaaaagaaattggcaatcttctttggattagcctcagttaggctgactcttagcatatgcaggtgagatggctgatttgtgaattttgcccactttcctctggtctacaactgtcccaggcttgacctctatctttgcttttttttcctttttccttttctgtttgcccctttttcctaaattatcccagtctcaagtttccaggcatcgtgaacggacagacatagtccgagacgtatttatgccgtctcgcgcggagagccatgtttgtataaatatctttcgctcctcaccagggaatgttctccttcactttattcttctatgcattgacctatctcttcccagataggcactcagtttactatcattgaaacatccttatatccttattgggtcaccttgaaccatcatggttgttcccaccttcgccggcatgtctggcaggctcttatcgcgtgcagttaccacaactgcgacaatgggtttcctactattcggatatgatcgtatgttttgtcatcctgaactaagcactccactaataatagatctgctacagagggtgttatgagcagtatcattgatgcttcggacttcactgatatcctgaccgagttgagaggtaattcgactatgcagggtaccgtcactgctctctatgaaattggtaagctccgtcgaggatttatgtccgccttagtttccagtttgatactaaagatttatctcagggtgtctttttggtgccatcttcatgctcgtctggggcgactggctcggtcgtcgaaaaggtatcattagcggcgctatcgtcatgatccttggtgttattgtgcagatcacttcttatgctggcaagcagcctctcgcacaatttaccattgggcgtatactcactggtgtgggtaacggaatgaacacttctaccattcccacctaccaggccggtatgtattcaatgaatttgcatggaatcttgttagcatagagaaagtcgactaactctgaatttagaatgctctcgaacctcaaatcgtggtcttcttatctgtatcgagggtggtaccattgcctttggtacactgattgcttattggattgactttggtgcatcatatggtccccccgatgtgatttggcgttttcctattgccttccagtgtgtgtttggattatttattattgttggtatgatccttctacctgagtcaccgcgctggcttttcacacgggaacgctatgaggaaggtgagaaggttattgctgcacttctaggcgccgaaccagactcccacgaggtggccctacaaaagaacatcatcatggattctatccgcgcctctggtcaaatggggaagaccaccccaatgtctgccgtctttaccggtggcaagactcagcacctccgtcgtatgctccttggagtttcgtcccagctcatgcagcagattggtggctgcaatgctgttatctactatttgcctatcctctttagagactcgatcaagctggaggggaagcttccatctattgtcggtggtgtcaacatgattgtctactccatctttgcgactgcttcttggttcttgattgaacgagtcgggcgtcgcaagctttttctctacggtaccattggccagatggtctcaatgctcatcaccttcgtttgcttggttcccgacaagtccggtccagctaagggtgccgctttcggtctttttatatacattgctagctttggtgctacttggttgccattgccctggtgtgttttgagtcccaaactagaaatcaatgtgaatactaatgcgtttctaggctgtatccagccgagatcagcccgatcaagactcgtgccaaagccaacgcgctttcgacctgttccaactggcttttcaactttttgattgttatggtaactccaatcatgattgaaaagatcaagtggggaacatatctcttctttgcagcgctgaacgcttgtttcttgcccatcatctactttttctatcccgagaccgctcgccgttctctggaggagattgacctgatcttcgccaagggattttcggaaaatatcagttacgtgcgcgctgcaaatgagctaccttacctttctgacgaggatattgagcgtgtcgctatccagtatggatttggtgccgatgagatgaagcctggtggtgtttcgcaacctgaggctacctaattgttgggtgtggtagacggccctgcttttggcgaatctcgtgcggtactagatgtagaatgctctgatattttgtgttagatgcctatacaagacatttcaataaatgactagtcaagttgcagacagctttcggactcttaggaccagcaggaacatgtgattatgaaggtattgaaaaacatcagcaccaccactctataggtagtagatcctacaccaattgatatgatattgggattgtaaagaacatgaataataccgtctaatacgtatgtagagtagagacgaacaggcatctaatttatcccccccccctcctcccatttcatcatatgctagtatctcaatagaataacgtaagtgcaccgggggtgtacacacctgtggaccctagagcaccgctagatccttgtgaagaagtaaagatatgcggttttcttcatcgcttcgatatcttcaaacttgacaactttttcatcattgaacatcacccatgacaggccactttgacctggcaattgtttgcgaatcatggcaacataatgcctagcatgtgttagtctaacccaacgaagtgagaacgaagacatagagccactcaccctgcatggacagatgtgcctttgtggcatacaattgaccttaattcatatcgagcaggtaggctagtaagcccaaccgagccaccatgagactgtgcgttgtggtcgtcgatactcggtgtttccatttccaccacatcatctgagtgagtgaaaacccaatccagtgccctgttaacatcaccgtcggtcgcggccaaggctcgctgggcacgaggcgcctcaatacccatgtcccctaattgagcgatttttgccgcgtcttgctcattagaactggaggtgccgactggttcaagggccatcggttcatcgatgtctggatcttccatgtgggcaaatagccaattcatggcagtttccggatcagagttgccagtggcatgaagagctttctcacacctcacagcagggaaacccatgcctatgagttgatcgagggctcctggattcgggacaaatgcggtagattcttcaatatcgggaagttgctcctcacccgcatcatgctcaccagcaaggtaagagctgaaatccagtggtttgtcgtcgaccagcacagggatatccaactttgtcggaacccagttgacgagctcaaaccgacgagcattgaccactaattcctgaggcaatgttttgaaagacgactgcttcgaaaagccatcttggctgccacaagcaggacaggtaagctcaacgacctccgccgaagtaaagatgtctagacactctgacaaatccacagactcatattcctttcctgttccgtcagaactggtaataggacgtgcggggacagcaaccgaaacgttatcttgctcatccactttatagcggacttttttgcaatgcaagcactgaagacgctgctcaacctggaagcgaaagtcctggaccgggttaatctgcggactggtgtgtttcgataggctgacagacttgaataaatgaaggaggaattcaaatgcatcttgctgtctcatagttgagaactcctcatgaccttggccaataagatacttgaacattgctggtgctaaacccttctgatgagcgacttctggtatatccgcggacaacataacgcgagaatcaggccgagagtaccggcctgagagtagaccgtcggcaagttttcgcaattgtgtctcaaggtcctgtgctggtgcttggcagagtggtggttcttctgacagctgatagtatcgctcacgaaatccggccacagaaaatatgcattgcatgatactggagagatagcagctgttgccaagattcgccagacctgtaaatgcaggcccaaagacagggaccagctcccggccatcctcggtcgtcatggaaaattcccattttagattatgctcgacctgcatctccatcagactcttctctgtcttctcacgcccagccaaatagattccccagtgcgcaaggtgggtcgctagttctgggtctactctttcttcgttgcacttataacagtagacatcagcagagccttctgctgtgatggagccaagcttgacagccacagcatgtgatgttgagtctgcatgagtaagcccatgggagtttcccttgcttccaccgaattgacttcgcccacaacccttattcccacattccagacacagccagaggttctctcccaggtcacactctgaacaatggtttaaatctgcaatttcattagcccagaccccagttgagtatttcagggaatcaataccagtcgatgcggcatgcgtgttgtcctgttgaaccagacacaatgtatgctcgcaaggcacaaactcttgctcccatgccttgacttcttcctttcttgagaaagtcattgctgtcataacaccttcaatgacagcagggagcttgccactggctttgtccacattgtcttgggggcatgaatagcacaccactgacgtagcaatgtcatatctatcctcttccgtttcggctgcgatggaaagctttgaaatcttcggcgggggctcgtcgcgctataaatcagaggtgtgagaatcattggccacaagtccaagaaatgtttagaggctgtacctgcactttcttaggagtccttcgtatgttcaaagccagtggatggccaaatctcttgtaatgaagcagggcatggtctctgtttccagcacatccaccattgaagcaattcagacagacatttagaccagcatcatcgtccttgcaaggttagtcagacgacatgtggagtggtaggaaccgggtggcatacaatagaatcaaagcactgagtacaatcttctcgataaacagcctggtaaggtcctggcggattcagatctatggagtgttgtccattagctccatttgttcttcgattatcaaggtgatgtcacaaacccgcagcaccggtatggacacaagaggccatatccagagtggaaatctcagtaattcacgacgtgtcaataaagacttcttagcttttaacgaggacttcagaaggtgcgatagtatcccattgaaagtaaagatgggaaaaagacggaatattaaatagtgcagatcaagctaaagctacgatgcgtggggttgctccttcctcaccgcctgcacgtgctcttatcaatgttgtcctgaggcatgaagtcatgtggtgggggtgtgccacttaacgcgttattttcttaacacgcgttccaaccttgtcctccaacctggacttgctctctcaagttcggtcttccttgcttcgtttcttttttatttccctgattcatcccttcacgtcatcgtttttagtctttcctcaagtcttctttctcgactctctcaattattgaaatttgaagtcatcattatcatggcttccgaggcagcatcccaaatcactattggggctctaaggtttgtattcattggtctgtacggcagtatataagctaatcgcgtgtttaacagtgccatatttgatgaaaccaaaccccaagtaccagagccaattgttcaatgcgttcagatcaagaccttgccatctccgccgaaccaaccagaacgttaccgggctgttttcagtgatattgcgaactatgtccaaacgatgattgctactcgtacgtgctttcctctcattactcttagtagctcatcggacttactaaccgctagaagaagccactggggtggtgaaggatgggtctcttcggaagggctgtttcgtgcgactcacgtcatttcagtcaaatgttgtcaaaggaaagaagtatgtgatgcaattctatccattttgactgtgctaataatcacagtatcctcgtcatcttgggccttgaagttctaacggaactgggcgaggctgaaaaaatcggtgatcccaaaccacttgcagtcaaatccgaggaagaggaagtgggtcaaccgacaacaatatccagcaatgggttttacggctccaagatggagggtgcacaggctcagccgaatagccgagcccagccaatctctgcccctatgtctacttcctccgtccatgccacaatctacccgattgaagccgtctccccgtattccaacaaatggacgatcaaagcgcgatgcacaaacaagtccgccatcaaaacatggcacaacaagaatggtgagggtagactgttcagtgtgaatttactggacgacagtggtgaaattcgtgcaactggtttcaaagaacagtgtgacatgctctatgaactcttccaggagggcagcgtttattatatttcgactccatgtaaggtccaaattgccaagaaacagttctcaaatctcaacaacgattatgaacttgtatttgagagagataccattgttgagaaggtaacatctctttcttcataaaccaaatgcgtcgctgacattctatgataggccgaggagcaaaatgatatccctcagatccgatacaacttcaccaccgttgctgatttgcagactgtcgaaaaagacacgaccactgatgttattggcgttctgacggagattggggaggcatcccagattgtatcgaaaagcaccggcaaaccttacgagaagcgtgagcttacactggtcgataacacaggattctctgtccgcttgacaatttggggtgcaactgcacaaaatttcagtgtgacacccgagtctgttgttgccttcaagggagttaaggtttctgactatggcggaagaagtctgagtcttctgagttccggctcgatgactgttgaccctgacatcggggaggctcaccgactcagaggttggtatgatgcccaaggcaggtcggaaacctttacatcccatgtgtcaaatgcgaccaactccatgggcaaaagggatccctttaaaaccattgcgcaagttcgcgaggagcagcttggcatgtctgaaacttttgattacttctctctgaaagcaactgtgatcttcatcaagcaggataacgtctggtgctaccctgcctgcctttctgacaactgcaacaagaaggtaacggaacttgatccaggacagtggcggtgcgaaaaatgtgacaaaacctaccccaagccagagtaccgctacgtcctgcctattagtgtcggtgaccatactggccagctttggctcagctgttttgacgacactggaaggaaaattatgggcacatctgccgatgacctaatgcaacttcgcgaagacgattccaatgctttcggtgaagtcttccaaacagcgaattgccagacctggaacttcaggtgccgagccaagacagataactttggcgaccagcagcggtaagaatgatggaacgacaataattcaaataatgcgaacatcatgctaattgtgtcatccagggtgcgatatcaggtctcatcctgccagccgatcaattactcggaagaagcctctcgccttgccgatatcattgactcgtacagcattgagtaagtacaggcacagtggggaaatattattgtcctgctttgtactagctttactatttccatatacgctcggagctttttcatcaatgttcatgtgtacttttactagtatgctgctcaagctacgccatgatcatctcatttatggcttctcattttgacatttgttcgttctcccttatttagtattttaaaaacacctaaatagtaatttttcactaccatccccttccttatgagcaatccgcaatgtgcgctatcactccgtctggacaggactccaaaggttctacatgtaccgtactatatgtgaggcggtaagccaacaaaggcggaaatcaatggcattacacgattgctttttcttttttttttttttctttcgggttttctgctggaacaattcaggcagggaattcagtctcgtgctctttatcttttggttcattctaaaatactcatcatgggtaagcgaagccatcttgagccagctgagcagcgaccgaagaaaaagtccaagtctgagaagtctgagaagtccgagaagccctcaaaagcttctaaagataagcaggaaaatggcgatgagaagacagcagcttattctgatgcgtctgctctatccgatatccctcagtcagacattgacgcttttttgaccgagaacgtgattaaagtctctgatccctcctcacccgacgccacacaattccgcccaatcctttcgtttgatcacctacctaaatgtgacgctggtctgtacactcagttgaagtctttccccgcgccaacaccgattcaatccaccacctggccgcttctttttgccggccgtgatgtggtcggtatcgcagagactggaagtggcaagacacttggctttggcttgccgtgtctgaagaaattgattgactccaagtcaagcaagccttgtcaacccaaggcagtggttatctcgccaacacgagagcttgcaatgcagatttatgaccagcttgttaaattcggcggcactgagaagactcgggtgacatgcatttacggaggtgtgggtaaagatgaacagcgtcgggcccttcaaaaggccgccattgtggtcgccacccctggccgtcttaaggatctcctgaatgatggttcgattgatcttggaaaggtcacctatctcgtcttggatgaggcagatcgcatgcttgacaaaggatttgagcaggatatcaaggacatcgtcaagccgatgcccgtctccaagagacagactgttatgtttacggcaacatggcctcggtccgttcgagatctcgcggcaacctttatgaagaacccagtaactgtcaccattggcggagatccatctgcggatccccgagccaaccttaggatcaagcaagtcgtcgaggttgttgatggccgagataaggagagccgactcatgcagctgctcactaaatcccagcgtggtcatcagtcgcccgagaaagtcctggttttctgcctctacaagaaggaggctatgcgcattgagaatctcatcagaaacaagggattctctgtcgccggtattcacggtgatttgaaccaatcagatagattccgaaatcttgatgctttcaagaacggcaaagctaccattcttgtcgcaaccgatgtggcggcgcgtggccttgatatcccgaacgtgaagctagtgattaatgtcactttccctcttaccgttgaggactacgtgcaccggattggaagaactggacgtgctggggctgacggccttgccatcacaatgttcactgaaactgacaagggactgtccggcgggtatgttactcatatttctaatatccttgactggccaatgctaatgatgaatagattgatcaatgttctcaaggcagctaagcaagatgtgccagaagctctgttgaagtttggcacaacagtcaagaagaagcagcacgatgtgtacggcgccttttacaaggacgttgatatggacaagacagcgacaaagatcacatttgacgattaattgggctcattccgacttggtatttttgctggaggatttggaggacaaaatgtgccgaagccttgtcagttgacccatcaagtattccctttctatataggctctattatttttgtcggttaggcgttaagaacaaatcaacatggaatccgatcagatcagtactcacattacgagggcatagccaccacttaaggcgcatgctttgataattcccaattccaggccaaatccgcggcccaagaacaagctcgccagagcacacagaatgaagctagcaggtcgaatggcgacctcactcgtgtacaagctgcatccatttcgatggaagtaagatttgatgaaactgtaactccaaaaagttcgaaccgccatgttcacaatgttggccaggaccaatccatatgcacccaagctccctatctctaggaacatataggccgccaaggcataacaggcggaaaagacacccatccacgccgtttgcttccgtagctgttgcgaatttgccgcggatgatacgaacgcttcggtgatcccattaaatgccaaaaatggaatgtagtagcaatagacggagagcaggtctccgattttaggggaagcccattgacggcctcccaagatatgcaacaattgaggaaccatcagtgggcccaacgggaatatcaaggctgacaacaactggtacgcgcgtagaatatctacaagatgatctctggtagtgcggatatggatattgttcaacttcccatcctcatcggggctgagtagggcagagaataagttccggctgctctcctccagcggctggaagattatccgtgcaatgagaccgccatagttcgacgcaagagaatatatgccctgatcttccagtcctgaaagggctgcgagcgtcatagtgtcgccctgcgtgagcaaatgcttcactagagattggaaaaagacattcgcagcaattgacgttagctgtcgtgaaaatagtcccagaaagtagttggaggggtccctatatcaattgttaccatgtcattcttcgtggtatagcttgcactagatgaggccagtcttacctggttcgtatacgtgtcaataagaaagagaaccgagttccgttggtttctctgagcagggccagcgagtagccacaaatgagggccagcgagtagctgaggtgaccaagagcaaatggtagcacgccgaggtcaaagttgacttgagaagcatatatgaaggcaaaagatgtcaccgcacttctcagaaatgccgctggcatttcaacaacagcgcgtttttcataaagcatatgttgctgcaccactgagaaaaagggctcggtgctgagttccatgagagatgcagcgccgatcaagatcacactggggtagaagaaggcgatctttgatgcttcctctgacacgaagcgctggtaaagcatagtgaacataagactgcaaggaatcccaagggcgaggctcaagtaggacacgtttaccaccgcttgagatgccacagactgcgaatccgttgctacagcatctgcatcagaggaaagttttttgttgtcaggcgaagatggaacaggctgcctttggatagccatccgaatactttccctcgagaaatacaggatagaaacctggaagagctccagttgtgctgctattcctagcactaccggtgaaagggtgcgcaaaatcaattggttcgaggcaaaggtaaatatcctggacgctaattgaattaagatcaaaaagcttgtgcccgtggccgacgacgccagaatcttgcccatacgggcatcttcgggttttgccatgcccgtgattgaacctagttatgacgattcgtgcaataaggtgttctcacgtcaaataaatcaacaagaagactttaagccgacctcggggggtgtaggggtaaaggaaagagaggatgtggacaggtggggctctaatccagggcttgacgttttggcttaggcttttgaggaatggaagatatttgctagatgcaaatcaagaacttttttaagctgacgaaattttatatgaaaggaatacggagtaccatatagttaatctattgaatgccacttggaggtcacttgcttacgtgtagccctcaagttcccagctaggcatagttaagtatggctacaggctaattgtgaaactccttcttaaagaaccctctgtggcgtcttcggtacgtaagatttggtatgcaaaatttccatggcaaaaggaaagaggcactatgggtcaagatccgcaaagccctgtgtctcctccaagtggtcccccagggctgatccatgtcaacttccgtttgtcatcatatacaggaaacaagacttggaaagacctggtcactaggatatcaatgatcgtttgtagatcaatacgtctccaggtgttgccttgatcaagtaggctcttggacgctttagaacggaggcagatagaatgggtagccaccattcttggttttgaagacactaagaaggaagctgtatgttgtgaaaagaacagttgcccaaatcaagacagccagctgttgacccttgggatcttccatccggggaaccttcagtgcgagtgcgatcgtagcaaaggagagaacagcgtctgcgagcaaaatgttaacctaggaattcgacatggaaaggaggcccagtatcaatgagtctcacgattatcacttacagatggcagccacaatctgagtttccatcccaaactggttttggaacccaccggcaaagtagctaatgccaccatggccatcaccagcaacatatgggacctttcggatgtggttgaacatttgaccacttgtgaacagaagaatagcgataaggctgattgcagcccaaaggtttcggttctggataattgggagtatgtagggagaaagaactgcaatcgcagtcacaactgccatcagaattgtgatcgctgatacaatccgcatatagttgatgggtcgaactagctgaggcttggggccttcaggcaaatgacgtccaatccaagagtagacctggtcggctgatatcgggctattttggattgacatgttagtgagacaggagatgggcaagacccttggtagaaaaacataccctgtgaaatcaaaccgaaggggatttccttcaaccttggcgaagggaccgacggtaggagggaagacaaggagtacgggtgcagtttgaagcatgagctgcttaggttagtcgcatgccatacagctcagtctgagtaaaaatgccttaccttttggaaaatggctttgccattatcaaaatcaagtgttccaaagaccaccttgaggtcatcaggcttggtgcccttggtccagcttcgggcgatcaggtcccattcagattcgaagtcgcggcataggaggcagccaaagcgaggatccgtggcagtcaggataatcacagcatagtaatctcgaggtgtcgaggtgaggtcttcatatgatgcactgtccagttcaacaagccctgaacgagacagggattgatattttgtaaacttgtccggtgttgagctcgcagacaggacaccagacacgaccgaggaaaggagaaaaagggccgaccagagcttcattttagcatgacagtgtgctagacagcttgggaagggttatttagaaagtgcaattgattgaaaaaccatcaatcggttgcaattgaagttgtttgaacacgttgagtgataaagtccaggtgtccactatcaacgtaatcgcccggcatatcggcttacttaatatattcggggtcggcgtcggcgccaaaacacgggcgcgtcttcctttgcgacaattttatatcgtactttgacaagcattgaacataacaccacatatattacccttatatttcttttgctctggcctgtatcattttatttctaggcgttttcattctattttcttatatcgaagggctcctgtcctggacactgtcgtcatggcaatgacagaagaagcatcggcctcagatgtatgtggcttccctggattgatcctggtatagtcaaaaatgctgactctatcatgcagtttgaaatgtccataaggactatacttctagagaaggagtatgagaagaccctttcagtttccgctcgtcttctagatgaggagagggatcgtgtacgacgcatggagcttttgctctcgaaatttgagaatgaggctcttcggtcgcagttgaaggaagcaaatgggcatcttttgggattcacaagtgctgattcagaggcatgtgctcaacttcaggaggcttgccaagaaattgatcacctggagcttcgagcacaggcatcctcgattgagattaaccgactcaaggtaagtcttaacccagtctagaggccggaaacataatccgttatgttgacagcaataggaagaactatcggtccagaaaaataattcgaccagttataaaactgtccttgcagagaaacttcgtctctccagagaactttcaactttgcagtcagagcttgagcggttcagagcgcaaaatgcatcataccaagtcaccatttccgaaaaacatgagatggaacggcaaatgaactctctggagcttcaacttgataatgaaaaacatgcccatgaacgtgctcagctcaaggcgtcacagcagatgacagagatcacccagctttctgctcgagttggagagttacgggctgagctagcgggggaattacgagcaaaacagcagcaggaacaggacaaccaccaccagaacttggcatgggctaatgagcgggcgacgtttgaaggaaagattgattcgctcaaacaacaattgcggtccaccaaggacaagcttcaggaagcccaggttgaaattcagcagcgacgcaacgtaaaatcacacgcaggaaataactctgaatccagctctcgaaaaatcccccttcagcgccctggcccgagtgccggcgtgacgatcgtaacccctggtgctgttcgtgtgcaagagcaattgaaaaagcattcggctgtgcctggggacaagtcggcgttttccatcactccattcttgaaccgcacaggggcaccttcggattccccaatgagctcagttggagacgaagacgagattcttggaaacgacgacactcctcgtggaccacttggcaagcagggtacttttggcgaacagaagcgaattggttctgccctccggcgccagctatctccaacagaagaccgcattccaatcacaaaatccaccaaaccaagggcacgcgacggcgcaatgcctgtatcagcaccggataaagaggtcaaaaaaccaagccatcgcttagatcgcaggttgccacccaacgaaatcgatgaattacatgatcagtttgagcatgaacaagccaagccgaagaaacgcaaacttggtggtcagcgggatcggagcttgtttgaggaggaggatgaagaagagcctgagctcagcaagaaatttggacgaaaacttgcaacagggaatggtcgggctttaacgatggggagtaaaacacaaagtaccactggtctaccacgggcgcttgggctcggggcagcacccatagggttttctcccctgaagaaagaccgcagacgattttaatcagaagatccggcaattcattcttattggcacaggcttggtgtatttaatatgtacatgacatgtactccgtagacacgtacctagagaatgcccatgcttctaagattatgccgataagagccgacttgagtgttttgccggcagaaagtaaaaaaggtttcccaagctcccgattatctcccctgatattattcaattcgcattatgtttgctttacattcaactcgattttggcggaacgcctgccatcagcaggaaattggtcaagcaattggccaagcaagacatgcatcatccaaacgctggcaagcccggcagcaaaaggatcagttcaccagagaggcagctgtccaagggctgaaaagccgtgctgctttcaaattgctgcaggtgattcagaatcgacattactctatctctctggattagtctgacacactgttacctgcggttagattgatgagaaatatcgaatcttcaagggtgggcagacagttgttgacttggtatgctagtcgttcaacctaaactcggatcattgtttaattccgtcgctttagggttatgctccgggatcgtggtcacaggtgtgtcggctattccttatttgtctattgctgtcaaatgggccgtgattaactgccagaaaaggttgctgcaagccgcacccaaccgcatggccgagtcctcggtgtcgatatcatcccagcccaaccaccgaaaggagtatctacgattcaaggcaacttcctctcacccgaaattcaaacatatatccgagactttctccgcagtccagacagaggcaggccgcgccaacccagcttcctggacgattccagtatcagcccattggagccgaatgcagatacggaacgcactaccgaggccgagaagacggataagatgggcgagaaaatacttgaaagaacggtagatgtggttcttagcgatatgtccgcgccctggcatcagacctccggtttctggaaacgaagtctaagtgctccttataataggatgatgaacaccagcggcgtcagtttcagagatcatgctggaagtatggtatgtatgcctattactattgagtcgatatatgtgaaacccttctgactttacgcaggatctctgccacgcggctttgcgcttcagttcggatgttttgaaggcaggaggtcatttcgtctgcaaattctaccaaggcgccgaagacaaagaactggagcagcagctgaaggaattattcaaaaaagttcaccgccttaaacccgaatcatctcgcagtgtatgattgaccttatccaatttctacacccccaccgactaaagcaattgtcaggaatccaaggaggcctttttcgttggcctggagcgaaaagcgtgagactaaagctttttcggacttacgtgttgacagatcacagcatagccgaagtgccgaatcatgcagtctgtctaaaggatctcgatctcctcgttgtcagatgcctcgtcccagtcaatatcggctagtgctgcttccgccttctcatgaaccttcatattcgtcagtttgggatcaagtcgttttgtagtcatcgactgacctctcttagtccactcaattcttcgacatagccatgttcgttcaaggcttttcgcacaaagtcccaaccgtgctcgcggtatgcactgacaattttatctgagcatgcactgcagctcgaataacttttgccggtgacagacaagttctcgaaattagagagaaaccctcgtatttgatggggcacacttcctaaggggtgatcatcacgctcagtatttcgggcaatgggggctggtgcggcagcgcctcgggggtgctgaagtattgacacgaaaagctccaccagaagtgcagaggctataggagccactccagggcgggtcactgtacactgctggtcgagtgtttgatctttgatagactattccgcagtcagttctgtataaagcaggtcccttctttggataatcttacattagctggtactaccacatcgttgcagaaatagcacccaagctcagctggattttcatcctccatgataccatggcgcatcaccacaaaggaatcaaatcctagagctgcgttcatcacaattttcccagccgcctttcccatcactgtgggcagccatcgcgattctcgggtatccatgagaaggaagatagcatcatgttcatcaatcagtgtcttgagacgatcaaaatctgccctggtcgccgcttcgtccacaataggatggcctgccatgggcaccgagaacacataacctttagtatctactcccgggtaaatttgggttagggcttcggatgctcgaagtgctttttggacaccaccgttcaagcagtcttcgaaattgaatagtggctgccgaacagggttagaaaatgaaaccgtcccattgtcgacgaaagtgatcttcttcacgccccagccctatgtagtggatgattagaacaaattttcggcagggaagttgacgtccacataccagcagatttcgggagacgtagctgcctaatgtgccagcccctagcaatagacatttcgtgttcttgattttttcaagatcgagcgtcgggctgatccgccatttgataagtttgaggttgagatcaaccgactggtctgccaatcttcagtaataaaattagcatgcttgatcaagtcttcattcagtttggttatctccaaattaatgccatacctcttaggatccatgtactctgtaaggttgacaattctcccggctaatttcccagtcgagttgcgttcccaaccggtcacctttggcagtggtaacgacccttgactttgcagtgatctcggtgtctcagtctcttgttttgaacttgactccagctgaattactgtactgcgcccttgatcacgcctcgcgtgcacgtcgcgatagcgtatcaattgtaccctttcgatcccccatcgctgcttgatcagaacaagcaggtttcgtaacatccaccctggggcctgttcataatttgatgggtctgcgaaacagaaatagcggtcttcagtagcgacatttttgaaaaacccattttcatattcggaaagtgacgctatctgccagtttatatttgaagtgtcgccttgttgggcattcttcgtttcggaatcacctgaggatgcgttatcggaattctctctgacttttcgagccaaaaaaaaccctcgttgtcgaggatccaccatatatgaccatgtttccaccgcctccaccaaggcagtgctttcatgtggagataagtgtattcccttcaagttgtcaagactattatcctggtgtggctgggatacttggtctgttggttgcacggggacccattgaggatctgaatggattgctgggaaagcaaaccagtagtggaacttgtattttttgaggtctgcaaaagatacaatcacgaaactgcagagtaaggagggacaagaaagaatggttccatcatgaatggcatcccatatctggagttgattagtatctctctctaaggtatctggctaatgttgattcctaccatttgtccagcttgatagagcagtttggatctgtccatgtttcgatattcctcaacagtattgacatttttgatcatgccctctgctctgtaatagccagccgggaccctaggtcgctgttagaagggctttcagggatattttcttttatcttactcgctgctggttagggcgttcccatggatttgaatacgacacgacgcagcttcgggatcagacggacggatctcatatagtcccagaacaggccgggcggaatcatctagtttgtcatggttgatcttatgggaagccagtgaagtatagaagggtaattcgatgtcggaggcaaacggtgcgtactgcatcttggaggaacagggggagagaacgagaagaatagcttatcaactccagagtgatatagatttggaaggttggatgtagcagttagcaagggtggggggagggaggtgtaaaggtgtgtagtgaggtgaaagggtctgatgtcacgaggagcccgcggcgggggtgaaggtttatctatccacatttaccttcacacttgcttcatgtgaaaatgatcactacatatgtacccaaagccaagagctttatcccgaaaatataaataaaactaaggaggagtcctcaagttttagaggagcgaaattaaccgagacacaccgttaactcatagcgcgacatttaacaccacctcatatcaccacattctgaatgatatgagaggatgcatctcatttcgttattttttatcgtctatagagacctggccaccgtaagatgtgtcgccaactggatctatcaaaggggtccgtacttgcgaccccaaataataccttagttaatacaacgcactgatgagcaaaccaaatccccactacaaacctccaacgacgcggatgccattcccagctagggctccatctaacagctccgacgttcgcgccgtacataaagggatctcaggaagggacgacgccttcctggcaatggatcatcaattttaacgtcgcttaagcttcgcaatataaaaagatcggattttctaatatttcggattttactttttctttgttaatgttcaatctggtatgaaaccatatacgcatcttgatagtaagatagacaccagcaataagcaaataaagtagggttctgatttcgtgcagttactggtatactcaacgtgagtagccaccggcccaagccctatgtcccagctcagtggaatgcacgaggatgatatacatacatatctgcgccggtgagttgaactgcctaaaaagggacatccatggataggaggcttgattatatagtttctggtggtggatggctggttaaagtcagatatcgtagttgaatggcaaggagaagtacattaggcataggaaaccacctgtgagagaacacagctcattatcactaggccacaattaaaccataggccttttatatgtaatcatagaaagaggtgcgctgtatttatctgttctgtttcttttggcacatgggaataaggatctaaatatccgtgtgtaaaaagatcaaaagcagatagtgaaaatgcatcaataagaagatagactaagacatcatgaacgatgcaaccataggctaaccttacagacgccaagagcaatacttgtctatacagctacccaacactggagtatatgggcaacatcccgctatcaggccgataaggtcgcgtcgcgctttgctctgccccacttctttcttcttttcttctcttcttttagacagtacaatcattaaacaccctgaaaatgctcatcggcttatgtggaggtcagcagataattcttgcaaaccaaacccccacccgacacgggacgagctaacgaggatatacgtcaaaaggcatttgcgctggcaaacatgcgattgctgactacctgattcagcaagggtttcagcttcttgaactcgccgacacaccccaataccacactaccgacttagaggatgacctgcgactgcaagcgtcggagatccgaaaaaaagaccccaagtcaccaaagcttatatttcaagatgccgactctctactcgactttgcgacaaaaagatggcaagaacgctgggttactacagacattgcagatcctactaccctagatcgattcctcttgcgccccttcttcctcctcgtgagcgtggatgcgccaatcggcctccgatggaaacgatttgccgacaggttcgtgatgatacatgtgactgaagtccgagagctgattttctttttctttgattgaaaaaagatgttggagaagacaactggatccgcctgagcttgaaaagttcataatgtggaacgatcataatctttacgatcaggatactggacgtgtatacttgaccgacaaagctcaattgcgcctattcaattcctcgacaggcctcaaagagttacactcggctttacaaaccctcgacctggaaaacgaacaaaggttgaggccaaattgggaccagtatttcatgcagctggcctctcttgctgcccgaagaagcaactgcatgaaaagaagagtgggatgtgtgctcgttcgagagagtcgtgtcatcagcacaggatacaatgggacgccacggcatctccagaactgcaaccaaggcggatgtacgatacaggccagaactgaataactctaatggctctattgtccatttggctcactagaaatcattataggtccacggtgcaatcgcggggatggaggaggagtcggtctctcaacctgtctttgccttcacgccgaagaaaacgcgttattggaagcaggccgagagcggatccgagaggggacgatcctctattgtgatacgtaagtctacttcattcttctatgaactgtttcaaagacaaaatatcttactgtggatttcagatgcccttgcttgacatgcactgtgaagatagcccaagttggaatttcggaggtcgtttattctcaagggtacaacatggatagtgacgtaagtcaatgcttgttcattccaagggttctaattaatctaatttgaacatacagagtgcggctatcttacaagaagcaggcgtacggctacggcaattccacccggtagctaatcttctatgccctcatttctctttatgcataactgacttcataacagcctacaaatgggctcatcgttcttcaggcacccaagataccagtcacaactgaaacccaataacccacaatacgacagtaaaggcgcagggcatcccaaccttaagtgaagagaaaaatgcacctgcatcagtgaacatttccaccactcagggctatgtcaaagttattgtacaaagtaacttgtccaaataacattgcaattaaagggaaggggcaaatatcctagggctattagtagttaactattgtctcaagaaaatactatgactcacaggtacttataaagtatggaaggaacttagattatatagtaactttacgctttgaagaagtaccctaatgtacttattttctccgcattttgtccggcagaaaaaaaaaaggtatgactcagcgtgcggattttggcgggggtcttcaaggaacccctcgacggtttttatagctggatgcttttcggtgttggttcaacctcgatagtccaataccttacccgcttccagctgcgatcaccattgtacttttggcctaagttcctacagccatgcctaccgtccacttgctggactacgtggcggggaacatccgctccctggtcaatgcgattaaccaagtcggatatgatgtcgaatgggtcaaaaccccagaggatgtgaaaaatgccgatgttagtcaaatcccgaatcaattccagcaccattggctcatgaccatgccgttgctaacagcagaatcatagaaactgatactccccggtgttggccattttggccattgtctttcccaacttgacaaagggggatttttggagcccatccgacagcatatcgaatcggggaagcctttcatggggatctgtgttggcctgcaagcccttttccagggctcagaggaggacaacgacgttccagggcttggcgttattcctatgcgcattcaaaaattcaacgacacctcgaagagtgtaccacacattggatggaattctgcaatcaacacgggatcagatggcacaaaacacgaaagcttttatggtctgaggccgactagcaagtattattacgtccactcctatgcggccccctacaacccgggtgtattggaaagtgacggctggtctgtggctacagcaacatatggcgaggaagagttcatcggtgctatcagtcggggtaacatctttggcgcccaatttcacccggagaagagtggtgtggcggggctacgggccatacgcgcattcttgaatggcgatcaattccagtcgctctcacaggacctggtccttggcaaagaaaacgggctcactcgtcgtgttattgcttgccttgatgttcgcacaaacgactctggtgacttggttgtcaccaaaggtgaccaatatgatgtccgagagaagagtggaacagatgccggcggcagcgttcgcaatctcggtaagcctgttgacatggctaagaaatattacgaacaaggagcagatgaagtgacctttttgaacatcacctctttccgaaactgccccattgccgatacgcccatgcttgaaattctgcgacgaacatcagagactgtctttgtgcctttgaccattggtggaggaatcaaagataccgtcgacactgatggcacccatgtccctgctctggacgtggcaacgatgtatttcaagtctggagccgataaagtcagcattggctccgattctgtctttgccgctgaggactattacaacgccggtgaaaagttgagtggcaaaaccgcaatcgagacaatatccaaggcctatggaaagcaggctgtcgtggtgagtgtcgaccccaagcgggtatatgtggataagccagaagacacccatcaccatacaattaagaccgagttccccaactcaactgggcaaagctactgctggtaccagtgcaccgtcaaaggtggcagggaaactcgcgatatcgatgtgcggcaactcgtgcaggctgttgaggccatgggagctggtgaaattcttctgaattgcatcgataaagatggaagcaacagtggatttgatctagaattgatcagagatgtcaaagcttcgatcaagattccagtcatcgcttcaagcggggctggtgtacctgcgcactttgcagaggtcttcaacaaaaccaccaccgatgcagcattgggagcaggaatggtaagtttacattcttccaagtattattttctttcacaacagagtctctgaccatgtcccagttccaccgtggtgaatataccgtaactcaagtgaaagactaccttcaatctgagggattcctggtccgccaatttgaggctgagatttaaagactcggctattcaaaggtgtgatatcttcacatgggcatattttgcaaatttcacgtttttatacgagaatagagaatagatgtcatgggggtcaagtccatcaaccaagatactatacagttcaaatgtgaagcacagaaacaattcaatacacaagatgtttgagataatggattccaatagaacgtcgaagggcccggggccgatacagctattggcccgcccgggaagtcacatgatacactaaaggcggtctacagggcggtggagacagacacaaatcatctgacttttcctcacttgccacttcaccttctcctctccccgagtcaataaccgcggcgctccaaaagtcctatcctcaccacccacgcacctagcttctttcttgctaaatttcgattttttgacgataccctgtcggccttgatcaccgaactatattacttaacagctgcgacacctcggttttggtcgtttgacagcgaatttgctcattcctaacaggtctgtataactgggtttggtgtctgcaaggatcttcaaaaaggtccgacacaggtcagggtgctagggtggctctgcgaatcacttgaaggacggggcagaccatcaatctctcttgaatacaccttttttttaattcagcgccagtgttcgatcatcgtattcatcaattccttgatctccatttgtatgcagtgacctgaacactcaccattcagcattcaaaagattctcattcacacatccattgtctcagtggtctattgatccctgcttttttaaaaaatatctcgtgctttctctgtgatttgaacagataacgtctgttgcccgacctttctttgttgtgcctggtgatacaccagtttcacttcatctcacgagtttttttttcattcctctctttattatcccctattgctcactgtacacggcgacggtgcccctaaatctgggtcttaatacacctacggccatctttgttgcacccatccccctcccaaattgaatacaatgtcatcctctgttcatttcaaattcaaatcccagaaagaaccctcaagggtcaccttcgatggcactggtatttcggtctttgagctcaaaagagagattatcagccaaagtagattgggcgatgggagtgactttgagctgtcgatctacaatgaggacactagagagggtatgttactttgttccaatgtgtttcatttgctcctgactaacagcaagtcttctgagattcaatagaatacgacgatgacacgactataatccctcgatcgacttccgtgatcgcccgccgattgcctgcagcgcgccctggtaagggcggcgctgctcgttatgtttcaggcaagatgccagtcaatgctcgcagtgctcctcgcaacgaaccctcgatgagccgagtaacacccggatcagggcaatccgtcaacaacaacgtcctcgaactcaataatgcacaaacagaagaagagaagatcaacgctctgttcaacctgcaggctagccaatggcaagagcagcaacaagaaatggcaaagtaagcacacttcaaccggatgtttgattatgttggagatattaatataatttagcgcaacacccgtaccgtttggtcgtggcagagggaagcccgtcaatgtacccgaccaccctccgcctccagggtatctttgctaccgttgccgggaaaaaggtatgcacctctaatcaaatcaccccacctacagaacgctgacctttgtacgcaggtcactggatccaagcatgtcctacgaataacgaccccaagttcgacggcaaatatagagtcaaacgatcaaccggcataccacgttcacttcaaaccaaggtcgacaaaccagaatccctagcccccgatggctccaccgaagattcaaggaatacaggggtcatggtgaatgctgatggcgactttgttattgcaaagccagacaaggcagcctgggaattgtaccaagaaaaggcgaaggcatcggcggcggcagcagctgaggcggcagctgccgaggagagcaaagcattgcaagctcgaggtctggagtgcccaattgacaagaggatgtttctagagccaacaaagacaccatgttgccagaggacatattgcaatgattgtatttcaaatgccttgattgaaagtgacttcgtttgcccgggatgtgctacagagggggtcttacttgataacctcacccccgatgatgaagctgcatcaaaaattaaggaatatgaagccgacaaggctgaagccaagaaggagaaggacaaagtcgtcgcaggccctaatggtactcctatccccgacgtctccgaaactgagcccaaggagtcttccgccaccaaagagcagagcccactcaatcaaactcaagagactgcgtccacacaatccaggaaaagacccgctgaggacgagcctattagccggaatgaaaccgcgaactctgagccgggtaacgtgctaaagaaacagaaggcagatgatggtcattccgacgttccgacccaggctaatagcgtccaagacggtgcgcctggtgttgccccagtgaattttaataatcaggatatgcccttcaacagctttggaccaatgcaaggcatgcctatgatgcctttctcggctcctggattcggtaatgaagccatggggtttatgaaccctatggcgatggcgtctgccaatggcttccccggtggaatgggcccaggatggaatcccatgaacatgcctttcaatcctctccaagctggaatgttcgatcaaagcaatggtggcatgcccaacggatttcctaacatgttcaatggagacccttcaatgatgttccccatgccccagaatgggttccaaggcccaaactctggaatgaacaatttctcaaatcagcagcggacggctttcagcacaccttattcccgagaagaggattcaccgtatttccgtcaacctgtgaatccgcaacgtcatcaggctagaaaccgacgggttcggcctagtgattacagggagctttgaatagagaagtggtgatggcttgcatggatttgcattatgttttcctagtacacactgtgtatatgcatattatttacagcggcttttttttttttttcctacttattctttttttttctgtgtttctttttcatctcattctgaagaggtttctttttgaccttcagaacgtgtactactaccatggccgcaataagaataatccaattcatcatagtttcccacctttgtaataatcactttgactagggcttaggaattaatatcgagtatcatgtggctataatgccaccaatccgttcaattaatatctactgttgggcagtgtaactacttagttttaatagcaccctcttcatggacatgaaaacccggtagaaatcatgcataggacaagtaagccatgatatataacaataataattcaccagacgaagaaagatgaggaaatataaaatgatttcatattccaaatgcagagggaggtcaggtgactgggcccattcacaccgtctctacttccacaccgtccactccgtccaattccgtccgcttcccctgttcaacatcaatcagaccattcgattttcttctcaaaaaaacaccaaccgtcttcatcgtgtcttctctacttcctttaaatttcaaatttcaacctagttcgatatcttgacctacaccgctcatcaaatccctcccaaaacaattatctgaaagatcaaccatcatggcgaaatatatgaataaccacagtagtaattgcaatcaaatgcaacggttcctcgaccaagactcccagagcactgttctcgctacttgctacagtgtcgagccgtctacctccaaggtccacggcttccactactgcactaccctgggcgccggtaagtatctcgtaaccaaacatcatctatgtttctcgatctaatcttgagattaggggtacagtggtatccctgaggtcccttcggggactaaatcgtctcttacaagtcctccccacgacatcctcgattcccgcgcggatcgaacctggcctggaaacagttggccagagtacaagggggaggcaacgcataacatcccggaagagtgtgagagactcttctgtgacagactgtctgcgacattcctgggtgagaggaaaatcgtgggacaggagtcactggggatggatgcgttccgaaatgtccagtcaaatcaaatcgggctccagcatgctcgaatccagcaatggatagaagtgtgggattacaccagtgatgctatttaccgtggatttgtggctgaacacaataaggagcggaccttgttcgttttcttcgaggaccgtgcacttgaacacggcctcaagtcagggtatgtacgccccttgtgtttccttggatgcgtttccttggacaagtcaaggctttccccttttgcctagtcacagtcctccatgtgtgtttgattcacctgctgacctttcaccccccttagcttgatcgctctgttcgaactcgccgatatcgctacctttgggtgttcgcaaatagttgcctgtgtcagtcgctcccagcgcacagatgaaatggagcttgtgcgaagtttaggatggtgtggattcagcctcaccaccttggcgccttgggtctcacacagtgatcaaggaccctgccttagtaataaatggcttttcttggccgctgaagtctagcaatagcatcattgtgtgatgcgtttatttcgtttggattggagttatggattttgcttatgtcctgatgcttgagcttttgcacaaggcgactgtccttttattctgactatcgagtattgcttcttgcttccttattttgatttctttttcatgcgtattattgcatagttccatataactatacactattctaatgaaattgtcactttcccccgctttcacggggaaaaaaaagccgtgaccgatacgataagagataagttatgtccatatgacctcactcccaggcctgctttcaccattcacctaggtatacctccctttcaacattgggaagccttttaaggtctctcggagtggagcatcctatttaaacatctcccaggatgtctaaggagcgtgtcaaaagactccagttccccaagttcctccttccctcggtgttttcaaaacaaagtgcggggctttctccaacagaccgtataccccaaaacacaaagaccacgaagtatcttgacggtcatgtttcctatctgtgctgtgcaggctgtgcctcacatctttgctggacttcccaaattattagcaaaggatttacaggtcgccatggccgtgcctatcttgtgtccgcagagccagtagccactgctgtgtcggtcagcgcctcgtcttcgcctacagcctccctccccaatacggtattgcagcgtccagttcctcgccagcttgtcacaggggcacatacagtcagcgatatcacctgtacattctgtgacagtgtcctgggctggaagtatgttgcagccgaagaagaatcacagcggtacaaggttggcaagttcattctggaaaccaagaaaatcgccgcctcttcatgctgggaatcctcacctggtgtggatcagactatgaaagccgaccgccaatatggaatccagtctggcccagcaaatacggagtttgacagccaggacgaggatgagtgtgaggatctgttcgccggaatatggagccctggacttgctgcacgtcgaagaaaccgtcagatcaaacgtcgacctgcgatgtggggaatttcataagttgcaagaaatcctagggttggacctcgtgggatgaggtcattgcgtaatgtgatatgatacccttttcaacaacgttgtctcgcgtttttttctattgcatacgaatttattataatagtagccaacatgagcttgcgatctatgatttgtatttttttctctttttttttcccccggaagcctagcatttcgtacaggatttgattcattgaattcattagcactctggtaattcagatgagttcgatgatatatgaaagagaaactatgtgattaagcctcctatatccctacacagacggtgcgacttgacagggggcgtagataggtacgtatggtatagcaaggtagtagtgaagtaaacagtaaataccagagcacggcttaccctgcagcattttctctacacacttcctcgaaggcttgtatttctgttacctcctcttccacatgaataatattcctcgtggatctcaggctaatattttaaaacagaagctgatacctgtatctatgacataaagtagtagcaacaatgactcctccagctacgataacaagtccagctctagtcacaagtagaagagctatggcggcaacaataacttctccggcgatagcattactagcaggctgttaactaaggccaaatattcgtgattcctggagatcatgtgctagtatatatatcaccttgggtttcctgaacaagggtcgtaatcagagtcgttcttcgtcgtggtcaaagcaaccattagacacaagcgaatgtgctaggatatgtctttcggaaactggcatagcgaggcacaatatacgatttatctacgatacttcacggatcaagaagcatatctgcaagttttccgatatcgtcgatacgttttgttgggttaataatgaagcattatagataactagctattacggcagtagacagatagacagactatgtatagtcatttatcctatttagttcgctatacattcgatttgacgaaaacataatgaagtctgattggataaagaggatactgccagtacatttaatatctgttctggcaagatggccgagtggttaaggcgtgacgtttaggttataaacccgtcatgcgaaagcgcgtgggttcgaatcccactcttgtcatatcatttttttccccctgccgatctctgcctacgtacatggacaacaatcaatttgatcctacttaccaataacctggttaagcgtgactagcggcagattggctaggtagtagatgtgtgttactagcaaagaaaagaacagcctttgaaaacacccagcttattatgtttcttagccatctaaggttgtcaaattgacaaaacgcctttcttttctatgtccctttaagttagcataaagatcaattcctcgccatataagctttgaaatcaagggctttcggcgagaaaatgagataagaaaagaaaaccccgattcagccaaaggacacaagaccaccttgtttacgaggaagcatcgtcaacgcgagaccgcttggagtcattctccgcgggttcctcggctggtcttttcgaggcggtttcaggttgctgggttggctgctttgcaggcttacgtttgacaaaggcagacagatctgttgctcccttgctagctgcatcaagctgggctttctggtctgttgcggactgacccataatttgacccagaactccctttagcatagcctcgttggcttggtcgttctgctcaattgagacaggggttcggcgcagatcaacaagctgatttagttcattattaatgagttcgaacaatatgtggcaacggcagacacgagagaaaaacttacccgttgctccatctcagtgacgatctccttgacattggcgatctttcgctttgttgcagttgccttgtcctcatccccatctttctcggcctcaagtttcttctcctcctgggccattcggaccttgcagctcgtgatagcatactccatctgggtggcagcttccttcctcatctcttcatcaactttgggtttatcgttgttatcctcctccccaccttgttgagctgatgcgaattccagggcgagagagagcttgtaatggcattcagcaacagagggatcttctagaggatacagcgagttcctcaattcgagaacagttctcaagtcactaaccgcttctctgaatctctctgcttccaatgagatctcagcttgaagatcgtgtgtgtctgcgattctttccttgatatgctttgtgtccgtggacatcgtagtcgattttcctttgccctcatcattctcttctgcggcactcagcttcttgaggtacagaacacgggcaagatctaggacctcaaaggcattggcgaaatcgtcgtcttcttcatcgtcctcggcttggtcagcaggttcctcatcctcgtcctcggagtcgacaaaattctcgtctcctgtaaactgaaagaatggcttagatgatgtgggctctggttctctgcctgcgcgcttagtggaagacgacttttccgccatcgaattggtgatcgcgtcttggacaagggaatcactggtggatttcgacccagcggaggatatatttgttgaagatgctttgccggattgtggttgttgttcgccggctactttggagccaaggacatcacttttactcacagccacgttgtacaatgactttccgtaggcatagagtaaatcggcattctctggggataattcgccgttgagttcggcctgaagctcggtagcttgggagtacagctcagaggcagagtcgtagtctttagtcgcatctttggcagcagcctgtgcgatcaagtcatcgagttgggttcgtttctcttgctccgagactgtagattgaccgtcctgtggatcagtcatggtgaatgcgatttatgtgaagagtagtgaaagaagaaagaaacaaattgataagaagaaaagaatagcctttcgaagaagtaagagtaagattcaagtaggagagccgagtgatgtgaaaaaaagagtgggaggagattgaaagaagaagctttagctccggcgcgcgtgtcacgcgtcttcgatttaattgaattctggatctctgtctctctccctctctctttcaccccgtctcccctcttattatgcatatactctgaatcatttccaaagccttttgtactctcacttgactttcgctggagcttttgagtcaattccaactctataaggcttttgtcgcgtttcttgaagtcttgggacaatatggacgcctcaacaccgcgacatcctgatcgcttcagaatggcgacaggggatcctattccttcctcctcgcctgcatttggaacaccagcacgtccattcagaatacccaagggaaatgcgcctccccctaaaacttcgattttaccgatcttactccctccatcaaccctgcgcccaatagcctttcgaaccttcacccgcaaacataatctcacaatatcatcacccgcgcttcaactattagcagtgtttgtgggcaagaactgtggctcaggatggcgcgaggaaggcctagcagagcgagtcctggatgaggttgccaagatatggaaaagagccggcggaggcgtgattgtcgaggacgggaaaggagcgtccttaaagacaatactgcaaacccttgagagcagtatgagtgggggaagggttgttgcagggaaagcgacttcccaaaatggttccttgaagacatccaccctgggtgtagatgatgggcgggttgaaacagccgctgatacctcaaaacaaggaactgccgaggaagacgatacgcaattgtcacttcagccaagacattggctcaagatgattgatgcctttgatcttccgcgcttgacgtacaacgtcgacaagaaatacttcgaagccgtaaagtcaaagccatccttgtttccatcaccatcttacaaaactgcactattccgggatcgatacaatcttgtgtatcagcgattgctccggaatgaatcctttcagagctcattgagtgtcactgctattccttcactgcaacgttcatcgtccaatcttgcccaccgacaatcctataaattgacgccaatcgcaaatttgctgggaagaagtggaagctcgcatttactattaggattgcttgccatttcacctactggagacttatccctggtggacttgactggaagtgtagcattggacttgagtcatgcccgaatgatacctgaagatggcgcgtggtttgcgccaggcatgattgtgcttgtcgatggcatctacgaagaggaagagatggtaaaaggtgctgccttgggagggaatacaggaatcggaggtgcaatcggaggacagtttgtcggcatatcaatctgcggacctccctgtgagcgacgtgatatctcgttaggaacgagtaaccgccacggcagcggagagctgagttctagtggtggatttggatgggttgactttcttggattgggaagtgaacgtgcccaaggtgcacgaatgagaagaatccaggaaaaatgcctacgaggagaacaagacgcagcggaaacgaccaggctcaaaatcgctatcatgagtgaagtcaacctagacaacatgaagacactagacgccctgaagaaggtcttcagcacctacaatgatctatctcttcctgaacgcccacaagcctttgtcttgatcggcaattttgcgcagaaagctatcatcagtgggtgtggccgagccgggagtatcgaatacaaggaatatttcgactcattagcgctggtcttatccgatttcccagcgttgctacaacactcgacctttgtctttgtgccaggtgataatgatccttgggcatcggcattctctgctggtgcagcctcaacaataccacggcaacctatcccggagttgttcacctctcgagtcagacgtgcatttgcaacagcgaactcggagttgaataggtcacaaacccccgaacccgcaggtgaggcaatttgggcctcaaatccggcacgtctttcgtggtttgggccagtgcatgacatcgccatctttcgagatgatatctcgggaaggctgagacgcagcgctgtcaacaccactcttgacactgagttagatgttacaatgcatgagtcctctagcagtgctactggtgatgcggtccttgctgcaggtgagaacgaggtcgaagacatgggccagcaacaaggcaccaaggctgcgaccacctcgtctggggcgttaatggcccgcagactcgtcaagaccatcctagaccagggaacaatctccccatttccactaccattgcggcccgtcttatgggataatgcctcagccttgcagttgtacccgctgccaaccgcactggtacttgcagacccggaagctgcaccgttttgcatgacttatgaaggctgtcatgtcatgaaccccgggcgcttgctaccggaaggtggtactcccatggctagatgggtcgagtacgatgtgttacgcaaccgagggaagatcagggaagagcgctgttaacctagttgtaggaacgatctaattgaatttcacgcatcatgaaaggaaatacatttagatgctatgtcatatcgagacctaggaatacatcgtgaagagaaccttgtagttgctcttatattaagacggaacaggcttaagaaagctttgagttacacaaaagccatggggagaatggagatggaaatcatggatggatcaccacaatgcctagtcaatggtgatgacatcggtatttcccctagcctgtggagcagcaggtgtcgagcccttgatttggaattgtttcggggtttgctcgggtttgacttccacttctctgtcgagttggagatggggagcattaagacacccgtgcagctcgagaatgaggttctcgaccttgttgatactcgctaccgctccatctccgaggccgttccaaccatcgcctttcgattggtacagtttctcttgtataaaagctgcgacctggccgcggccagactggtccattccattggcatcccttaacatccagaccaaacggtcctggtgcatcacggcactcaagtggaaacgagatctcagtcggggatagtgaatcaggtatacagtcggttttcgcgcgatgatttgcacaattgacagatccgtctgattcgactgaggggtgatctgatctaatgaccgcagcaaaggaagcgtggtagctaagagctggagggttgattcaacaccggcttcagtgaaccgctggttcaaagccacagtgaggggctcttgaattcggcgatgagggctagagccttcgaatttgatgcccaatttcagttggaaaagaggcttagtcttcgaaatagcatctgcaacgtcgacgtagtcagacaaagaaggcccctcggcgctgatatcaaagaaagcagaaaatttgttctcgtgcccataggcaaaattaattcgtgacaaggacaaagaccgaggctccattcccttccgtatgagggactggaggatagagaggacacactcgagtcgctgcaagagttcaaacagacaaacgacaacagaatgaccggctggcacaagcaaacgaagcgcgaagccagcacccttatcttcaatgatcaacgaagaatccatctttgagacgagtgggatcaatgatttgatacgggttttcaaagtgccgtgagccatcattatgacagagcggctctggctgtcaactccatggaaaaccagtcgaaccatttctttgaattgcgactgcttctttaccccgaagggcaagcttacccggaaagcaggtggaagtgcagacgagctgtagttgaacaaaagatccgggactgtgagatcctttttcagctgcaattctttcaacgaaggccagaaatgcatggctggcaagtctgccagataacgcgcattggcatggatcgcgaggattccagtgagtccatggaccagctcggcacacgttgtgtagtcgggtcgtctctgcggaggaacgagggtttcactgatcacgtgggcctgcggaacactcatgccaatattgtaaaagggtcccgttttcgctgcctcgattggtcgaagttgaacaagccaccagcggtcaccatccatgctactggttgctgcagcgacccaatgccggttccaaagccggtgggtgaagaaagcggtccgcattacaccaggagggaacagcttgcgaggatcaagcccaagaaccctttggttcacaagttcgagaccgagtgcctttgtgccggagcaaatctcatccaccgcagtgatacatcgcactcgggcgacacgagataatatctcttctattgatgatttgtagagcgctcgatcactatcgagacgctccaacacatgcggtgtcccacacaaggtaatagaccccgacataggttcgatagaaacccgaagagaacgtgaggctgtgagttgcatatctaggcgacaatctccaggttctgttggtgataattgagcctgtagtgatagtgtgtgattcgagaaaagaagatgctttttgagggtggtgaatgtggtagaaagaagatgtgacgtgtgtaatgcgataacgctcctcagaataagctccatagacaggtcacctgagttgaacctgatggcatcgctgctgacctgctggccatcacgcatccatcggaagccgagatgagatatcccaggtttcgggtcgctagaactgccaccgcggtgaccactcttgattcctatttcgagccagctcttcggccccgatctctgaggccaatattgaacgacgagtgttcggtgcaatagctcaatacgcaacgcatctgcccaaaggccccgagaaaggtccacggcttgcttgaagaggatgttgattttattcgtaagaacgagaccgtggagaaattggaagcatcccatcaaaccatcatcgcgaagaagatcattaatcttaccatcaagttcattgaatattcgaccttttgggataggtgatgatggcgagaaaaggaagcgaatgtccacgaagaaaaactgtgattccttcgactcttccgcgactgagagatcaagttcgaattcaccagaaattgtgaatgttacccggccatcatggacccggtactttcgcagtggcggcggcactgaatcgtgtaaagccaaccgcacactgatgattcggttgagtttcagtagctttttgagtgttgctcgtgcagttagtggggtgggaggtttgtaaccgagctggtaaggatgttagattattataggttaggaacattgaagaaactcacatctggcaaagaggctactcgtccctttgataatacctccaccgctgtttttaaatccgggttggcaacttgtgctcgaacaagatcgcgtttcacttcaccgacatactgaagagctgcgtcgtatgattggtgccgtgtgcgaatgaacccttggatatcaatgagtctgctgacatctgcagcttgtcgactccattgcgagaggactaggagtttgatgaactcggctctctttgcatgagcgaaatccaagagtcgcgacttcttatgcacattctccgatgactggttaccggctggttttccattggttggcatcgaaccacccgaggctggcacttgtatcgtagccaattctgtaatcaactccgagagctcattccaacattcctgtactgagcgattgaccaatgtcccgaacggaaagaacccttgtgtgatatgtggcagcttaaatggcgatgtcggcacgatttccgctgccttatctgggggcgttcttgtatgttgattcgaagcactcgatgcgccattggcataaactgatccattcatgccggagagatgactggatttatcggcattatcaaaggcagtaggcgcatcatttctggcctcattggggcctgggcgccgaacagatccctcgatgttgacattgtccatgatgacaccgggcatatttggaagtacagcttagctgttttgtgattgtccgtcgaagctttcccctccttggccctctgcacggcgcagaacaagcgacgcaacacaggcactgctccgggctcgatctagtcggcgctggggtaggaagggaagccgaaatcgaagataaggccacaggtagatccttaatatgatgccatgcgtttcacggaccgtgtaagaagaaggccacgctcataatcggaggagcttggcgcacggcttaggaatcgaatgggccttaagacggtcagtcgaggctctggcgatgatggcaacggatcgggatcggaatcagtgcgaaatgctccggatcgcacaggtttcgacttcgatatatctagcaactagctgtgacgagaggtgcgatcggggatctagatatttcaaggataatagcagggttgtcgcaatcgaggaacgcagcaaaacaatctggtgggctgcaggaaacgaaaggcagaataactgccgaagtaaaatgaattcaaatgttcatagatattctggaaaagcagcacctgggaataaagtgtgcccagaagaggactggtcaacaatatctcaagcccaagatgatttgatttgatgaaagcgcgatgcgctgcatgcatttaccataccgcctttgatttggtgccttggtgcctggtattgtgatgtatcaatttgcagagtgtggtaatatacgatgtattattggaagtaccgctacaatcactaaaatacaacttaacactggtcctgaagttcctagtgacttcctgtaccataccttgtgaaataccccaaccccagaaagtcaacattggccgtatgacctcacctctttgataccgtcacccaactacctaccccctaggcatcgttaacccaagtcactttgaactgaattttattacctcaaaatactatatgccttctcatttgatttgtttctggccatgaatttggctttcccttgccagccatgagtatacaggagaatgtcgagtctctccctcaatatcttggtgatgacacccggccgactagcaagagggagcttgctggctggtattgctatggctgggctgccgaggtctttgtagtctgtgccatgggtacgtgtgattctactttcatagatctgttttttgcatcttcatcctagactttttatctgatctgtgaaaggttcatttcttccgataacgctggagcagatggctcgggatcggggcgttctgctgtccgacaaaacgacaccatgcagcgcaacctggagaccctcgctgccatcaccaggctcggatgcaccggtgtatcttccccaggtgtcagatggcggccagtgcatcatttacttcctcggcgctgaaatcaacacggcaagctttgccctgtatactttttcattgagcgtcttagttcaggcagtcctgataatttcaatgtcaggagccgctgaccatggaacctatcgcaagaaactcttgattgtttttgctctcatcggctcaattgcgaccatgttgtttttggttgtggtccccaaagtttacctcctaggtggactgcttgcaatcatttcaaatacttgctttggtgcgtcttttgtccttttgaattcgtttctacctgttctggtccgccaccatccatcgcttaaggaaagtgaagaggcgacaccgtcaggcggtaatgtgacaagccccaggggcaaccctttattttcttcgaccggagatatggaccgaacaaacatggatgactctacgccgctactcgggcctaacagagaagccacaaagacgtctgcttccactatcacttccctagagcttagactctccaccagaatctcgtccaatggcatcggcataggctatattggtgcagtgattttacaggtgttttctatcttagttgttgtggtcgtgcgttcaccaacattctcattacgccttgtgctcttcttgattgggctatggtggtttgtttttaccatcccggcagccttgtggctgcgcactcggccaggcccacctttgttgggcagtgacggcaaaccgctccattcgtggatctcatacatggcatacgcctggaaatctcttggaaaaaccatcgcgcgggcgcggcagctgaaagatatcgtgatcttccttgctgcctggttccttctcagtgatggaattgccactgtcagtggcactgccgtactatttgcgaaaacccaactcaacatgaagcctgccgccctgggactgatcaatgtgatcgtcatgcttgcaggagtattcggtgcattcacctggagctacatatcgaatttcttcaatctcagagcctcacaaacaattattgcgtgtattatcttgtttgagctcattccactgtatggtcttcttggattcatcccggctgtgcaacgcgtggggcttggtctccaccagccttgggaaatgtatcctttgggggccgtttatggccttgttatgggtggactgtcatcatactgtcgaagcttcttcgggcaactcatcccccctggttacgaagcggctttctacgcgctttatgcaatcaccgacaaagggtctagcatttttggaccagctattgttggcgctattacggatcgctacggtgagattcgaccggcgtttgggttcttggcgattttgattattgtgccactaccacttatgcttttggtggatgtcgaccgcggtcaacgagatgcattggcgttgggagccgaattggatggcataccgcaaagatctgagtatgggaccatatctgacgatcaaaccacgggggatccgattgaagagtgaagatcaatgtatgtgtgactgtgaagtgagaagtaggggaaattgcattaagggtctctattcgtagggttttcgtttacaactaaaagaaagaagggtattcccatagatttcgtgatgttatagtaggatatatacaatagaggccacttgtcaacaatgcgtcaaatatcaagggcatgtctccgttaccattattgttatagttgtacctgtaccttattcaagtatcttgtaccttatactcgaatttcccataaattgacctggcaacggaggtaccaggtacctgaaggaaggtccgcccttgcaaccctgcatagcccagtcacaaagctccacctttagtgaacacactgtcctcaagttcccactccccaataaaaccttccctctctggatcttttaagcttgtctctactttcttctagctttcaaccttgagcattttggttgtttgattcaagatattaattatgcggtctttcgcccctctggtcctgagccttctcggagctactgcggcagtccacgctgctgagcctgaagttgccgacactgacgccaatgtcgtcaccttgacaaccgaaacctttgatgaattcgtcaaggagcaccctttggtgcttgctgagttctatgcgccttggtgcggtcactgcaaggcccttgcaccccattatgaggaggctgccacagagctgaaggccaaggatatccccgtgatcaaggtggattgcaccgtggaagaggagctctgccgaacctacgaagttgatggctaccctactctgaaggtattccgtggccccgatgcacacaagccctacgctggtgcccgcaagtccgacgcgtaagtcattctaggtttcgggttcttgtgctctggaaattaacgcgtttcctcgatagaatcatttcatacatgaccaagcagtctatgcccgccgtctcgaacgtgaacgaggagaacctagaggaattcaaggccttggacaagattgttattattggatacgtggcttctgacgacagcgcctccaacaagagcttcacttcgttcgctgaatcccagcgtgacaacttcctcttcgctgcctccaacgatgctgctctcgctaaggccgagggcgccaagcagccctcgattgttctctacaaggaattcgatgagaaggtggccgtttacgacggaaagctggaggaagaggccatccttgaatgggtcaagaccgctagtactcctcttgttggcgagcttggtcccgagacttactcaaagtacatggcggtatgtctaacttcttctgtcctcgtatttgagcaagaaaagaaactgactttctacaacgattaggccggtattcccctggcttacatctttgccgagactcccgaggagcgcgagcagctcgctgctgatttccgtcccatcgctgagaaccaccgtggagctatcaacattgttacccttgatgctaagctcttcggcgctcacgccggcaaccttaaccttgagcccgagaagttccctgctttcgctatccaggacactactaagaacgccaagtacccttacgatcagactaagaaggttgatgccaaggatatcggcaagttcatcaaggatgtccttgagggcaaggttgagcctagcctcaagtccgagcccattcccgagactcaggagggatctgttactgttgttgttggccgcaactaccaggaggttgtcgttgataacgaaaaggatgtgctggtcgagttctacgctccctggtgcggacactgcaagtcgtaagtttttcacacctcatctaccatttgtcgcatgtctaactcatcatcacagtcttgctcccaagtacgaagagcttgctgcgttgtatgccgatgtccccgagttgaatgagaaggtcactgtcgccaaagtcgacgccactgccaacgatgtgccagattccatcactggcttccccaccatcaagctctaccccgctggtgctaaggactcacctattgagtactctggttcccgtaccgtggaggacctagtcgccttcatcaaggagaacggcaagtatcaggcggacggcctggccgatggctccaagaagcccgaggagcgtgccgaggtcacttcggcccccaaggccaccgagtctcccgcatccgatgagaaggatattcatgacgagctttaagcgcttactcgctttttgaatgtgtaacttgatatgttgtattctatgcctgaactcggacttatattcgatgccatttattccccgtagactgttgtggcacaatccagactcttgtagtggctggtatagattgaatcagtaaatagtttctccgtataattctataaattttataaatactatatttgatcatctcccagccttgcagatcaatcgcgtcgcgtgaaacgcgtcgatttcttatcgccccggattgagctcccgacaacttccaaagtcctggggttatttctccaatcttcatatttgcccatcatggtcagccctgtcatgaaacgaaaatcggagcatctctccgcccctgactcgaaaaaacccaaaggtggaagcatcactgcattctttggagctccaaagccgaaacccgcgagcgcaacttcagccccacggccatgcagctttgataaggcaaaatgggttgcttccctgacgccagaacaaagggaactattgcagttggaaattgataccttggatgagagctggctcgctcacttgaaggatgaagtggtcagcactgaattcttgaacctgaagcggttcctgaagaaggagaaagattccaatattaaggtctttccaccagaggaggatgtctattcttggtaaattggatcactctattcaggccaaatgtgtgtgctgatcatactgtaggtcccgacacacccccctgaacaaggtcaaggtggtcattattggccaggatccgtatcacaatcacaaccaagctcatgggctatgtttctccgtccgtgcccctgtacgagccccgccatcattgctcaatatctacaaaggtatcaagatcgactatcctgacttcgaatcaccgcccgataagggagggcttctcataccttgggctgagcgtggcgtcctgatgctcaacacttgtcttacggttcgtgcccaccaggccaacagtcattccaacaagggttgggagaaattcacacagaaagttatcgatctcgttgctcgggtacgaaccaccggcgtcgtcttccttgcttggggccggcctgctggaaacagagtagcgaaaatcaacaaagagaagcactgcatcctacaatccgtgcatcccagtcctctgagtgcgcataatggctttgtgagtagatcctcatctaaggacatccttggaaaccatatttgctgacaggatgatatatagttcaaaaatggacacttcaagaagtgcaatgattggcttgctttgcggtacggagaagacgaaatcattgactggagcttagtgccatccgaaaagcctctgttgcctccttgcgtttctgacaaggaagattcgaccgctttggtcaaccatttgccacaacctgtcaagcctgaggatgtcaaagcccagcctgacaatgatgatgagtttgatgacgatgacgctattgaagccctaatgtcggccgaagcagaagcttcttcgaacacaatttagacttcttgaactgcatgcatgcctgtcaccttgctggcttagaaaagtcctgcgttggctgtgtttgtttccatgttcttttacccgaggaatatttcaggagttaagaagttgggccatttctatatgtatagtagctaattttcatttcaatctattgaatgtctgtttcatcgatgtctttaattaagctcatttcaattaagctcattggttgacaacgatcttgcgagctccttatcgataagcctatctcgatctccgattcttcttctgctgagaatctcccctataagtacacctgtgatgtaaatggtttcctagatggaactcacgtggcttccggatatccctcaatcgcggagtcgcactcgagctttgcgagcttgtcccacgtgccaacgatcaaaggtacgtacacgatgggaatattgaacccaactttccatctaacctcgcaatagaaacgctgccggcatttgattcccaaatgggaacccttcaatgacccgagatcaccgccacaatcgcacgatgaccttgggaggcctattcacagaaatgactcgaatcgcgaacagcttcctgcatccgcgcacatagaccgagcgcaaacaacgtccgacagtctagctccgttatcggttcctgccaccgagcgatttgtgggagatctcaatccagaatccctgattcgcgagcgattagatgagccgactgggagccctctccgggatcgtatcgggctttggatcaactccccagctgcgcagaaagcagagcctcggggcatacagagaggacaagccacagccggagaatatgcagccaatatcccggcacaaagcgcaatcgatggccaagccattgcatcgttacttcaccaaaggtttgcggcggggatacaagcatgcgaacaactacctctcgcgacgcgccagtctttgtccgctatctatttctccaaggttaatcacatcgtgccaatagtcgaccaggaatctttccaagcccaagaagaaggctcggcgtcggtgttccttgaaaaagccatatgcctcgccgcagcaaagacccgcgcggctaatccccacttacgccttgtgccagacggcccaatcctatcgtcacgccaattctgttctgagatatataaggagctggttgtagctatggacgcagagctagaaccggatcggttgacacggatccgcgttcttgcactgatgtccttgcactgtgagggtcttgaaggggccgaggcggcatctctacatctctgccaagctatccatcaggcccagacggtaggattgcatctcggccggccgaatcaaacctccacggattccctcactaaactcttctggtgtctatggacattggacaaggtgcatgcaagtatcggtgggcggccggttcttctagctgaccgcgatatcggggtcgtaaagcccgatgtcagcgctcagacgtcgcgaggggctttcgaggtgtggcttgccgtgtcggatttgctcgcaactgtcatatcgttctaccgaccctctgcagaagccacaagcgggtgggaagagggattccctgcgtttgaggatatcgtaggggaggatacccaagatgacctggattttgctactctgggtatgtctatcatggaggtctctgctgtgctatcgtttgagctaaccgcgagtaggcttcttggagctttactatcattctgtggctattttatcctgtcggtataaacccaccgagaacatcgatagcaccagactgtcgtctgtcagacaaggactagcagctgttcgcattcactccatcgtcgcctcggagtgtgcagatgacctaccaccccttccaatcgtgccgtactctgtcaccttgtctatgggtgttgcatatcgacaactccgctcgagcagacttatcacgcacctcgaccgagcgaaagctagtcttgaagcgtgccgctccgttctagaaactcttagtccatattggtattccgccgaggcgatggcccggctgggccaaaaagccctgcaccagattcaaggcaagccacaatcctctcggacgaaccctatcggtccacagcatgtggcagaggcctcgcacaaagaagtcagcacccacggcccggtatcagaggggccagggacaattaatccggcacctcaaggcaacaattccccccgagctaagaggcaacgcaataacgaccatggaaccactgctgtgtctccgccggaattcgcgatggacgtcctccaacctccggtgggcggtctggatacatctatacaagacggatttgcagacattgacacactgttcggagagttcttagatatctctctaccgacccatttctgggatcctatttttatggaaaatcaagggcaaacgaatgatccgcagtcataatcatcatcattagaagtatatactatgtataaaaaaaatgaaagaaactatacatgatgcagcgtgaattttagtgccaagccattcgcctgtgcaaccttccatacgagaagccgttcatcaacagactgtctccaagccgaagttgcctttcggatatggtcttcattctgaaagcttcatagactcatgctcggacataccgttccccgccagatgggcgaaatcaacagtcttagtttcagcatcgaagcccatcatgttcacgttatcaacctcaaaatcaaagcccttctcatgggtcgggagaccgtttggttgtgcgttgtcatcggcaaagaaatcggtgttgcccggatcgtcaaagttaataagtgcatcgaagtcattctgggtgacttcggcatcatttgccagatccatgagttcggtgagactcatttcagagggcatagcaaaggcattggggtccttgttgtggttggcattcagattgaggttattggtgctgccgttctcgcttccgtcggagtgcggtggtgtcgaagcaaaaatgtctccggtggaccgtccgcccgcggaaggaccggagagtttggggtatgtgagatccgggatcttctgagcgagggaatccggcgggggcgtgagggtgtgcaggcgggaggggatggtggtgttggtggtcgtagagagattgaagggatctgaggatgtggtaggttgttcgcggggatttgatgaggctggagaaggctggatgtcttggggagagatagtaagctgaatgcctgctttgcgaattgcggcttcgaggaaggaggtggcgaagtcggcagaggcgtagatttcgcgcaggcgttggaggattcgcatgcattgatagaagcgctggaggcttgtcatgcggatgcttgggtcggtggacttgatgtcgaggagatgtatgatgacggctggtagaaggactgtgacaccggtggtggggtagtaccgggtcaggtcgaggcaatgcaagtcctgggcgatggcagtgatctcgactgcggcgaatcgcaccttctttcgggacatgtcttggagttcggcgtctgcggatgggtagggaacggcggggaggacttgcgggcggtgcagagcgctagatgtggtgagatagaccatcttcaacaaagcgcgatgggagtgaagcacttcgtctgcttcggatagtttcgatccgttggatggtgcatattgggtttcgacggggaggttggccagccagtcctccaattcctggtcacaacttcgtacctcgaaggtctccgcggtggatttcttcgggacgagcatcatggtggtctccatggtgccaccaaacttatggctgaggaccgagtactgggcagataatacatggctgacgcagaggcagagcttcgctttctcgatgaacatcaaggcgagctcgcgctggtggctgacattctggagaatctccgagttgccaacaatcgccacgatctcgggggagaaagggtggaattcgaagtcatcgagactcagcataggcacatcacaatcgtcatccttgacacgcataggccgtcgcatgcctagggcaatcagtcggtcacgggtgtaggtgctccaccatatccgcttccacatgcgttgccgacggatatccatccgcgagttgccgggatcccggtgaaggccgattgtgtgggctaaagatagactcacccccatccaatgccaagtgtccttttggtcgtcgggagtttcgtaccagtaggtcatgagcagaagcgattgaacaagcgagatgcggtccacctcgtagtcgaaatcgtataggagacgagcacgctggaagaagactttccgggcgaccttgcgagtctggtagccggcggcctgcagatgcttcatatcaatgaaggccacaccggcaaacatgacagcctggaagagaagcagactgatgcggtggattccatcattctggacgatattctgcaggaactcctccagatcgagcaagggcatatatgtgtggacatagtgaatatagcttttcaagagttcgttccgtagtgtcacatcggggatagtcaaggcacccttgacggccaagtagtcaatatcctctttctgaagtcgtgcgggaagtcctcggatgtaatccgggaggaaaccactcccgggtctcgtattgccgaaattggggtctaatagttgttggatttgcgaggtcacattggctaatggcattgaagcgggaacggctgggttcggagccatgcggcgtcgatagtggtcgtcggaaccgatgcgttgagcctgattttgatctgttgtttttttttggtcagccaaatggatttcttcggggtttcgagggaattgacgaacatagtagatgaggcatatgttgaccgtggtcaagatccacagaggcttgcgagggagatgtcggtaccaaatcggccaatcctgaaagatcactaaggcgggagaaaggattctcctccgagccctccggagactccgaaaggttctctatctcaatgcgagacttcctaaatcacatgtcagtgaagtttataggtaattaatttcaattgcacgaactttctgcgtttactctcggtgaccacgcactcgacctggtctaaccggcaattcgtgcatggagagccattctccaccacatcacagcgcactttacgggcacggcaacaacagcaagccttcgaggcgcgtctcttcacgggacggttatgagcggagagaccggccgtggaggcctttcgtttcccagattcagtatcggtcatggtgtgttattgtgttcgggggcgactagggaacattcgagttatatagagacaccgggcatgtgatagagagccgaaaagggaatgtcacgatgtgtgaatatgtgaaataggaaagaaataggaaaataaaaaaaaagaaagaaaaggaaaagcaagtcgaaggccgaaatggagggaatccttttttatttaattgcatcccgcaaggtttaagtatgccccaggttcccacatttttccttaccatggttgaacccgcaaacagccaaggtttgaggggagtcgatccgctaggaatagattacggcttactgttccccccaggtattacagaaaattacccagttgggtaatatgccactacaaagtcagggctaagacccgtcagactggggtaccttcgacacctctctcggcccggtcacgttacgtctgctttggacatgtgaaagtcgatctatgatatcattctctgcatatgccaatatatgagatattttgaattgcaatattcaatgtttcttttgattgctctttttctttcccatgccaagtgggccctctatcctccgaaaaacaccgggctaaaacattaataaataaaacgccgtgaagatcctaaattgcgggtcgaagtcgaaaaaaggggaattttccagtcttttctcacattccccaactgtcccaaccgccaagactggagactgagttctccagtctccgaccagcggagccgatgtggaggcattttggcccgtttgagtcgacgtctggaccgatgagtaatgtgatcagcactcttccaaggttggtttctgcttattgaacggtgtcgatatatgttgtatatacatccatcttctggactatacaacgacaatcctactccgtacactccgactatatagatcatggcagggttgaaactattgattccttacataccgactcgacctacgtaatagcacggtcatcacggctccgcacctggacagctctgttgttattattaatcttcgaggccgggccttccacagtggaacgccattatcgttccaatgctatgagacaattaaattgtcctttgtaccacatggacaatctgttctacttgtactctctgtgctacggcttacattaaatagtgatacactcagacttgactcaccaatattatatcgtgctacccacaatccacaagccccggaataatgacaacaaccggaatcgtggagtacccctgaacgccaaaatgaatttatatcccgcaccgtgttcccacccggcctgccgagttagccctcacgtggaccaaaagtgccgatttccggaagaacgtccacattctcaaagcacatcttcatgaacgggttaacggggtacccttcattacttttacttttaggactgtccattccgttttgaaatatccagagcgcaatgacgccatactccgctaaaagcctcagacctggaattcaactgaaagtccaatggagaattctgtctctcacgaggtcgaaagcggatccagtgggacgccaatcactacgatagcaaaggtcaatgctggcttcttttttactttctttttcttttctgttctgtatctctttggttttattaccggatcctcccttggaaattccatctgcttcttcccggcatattccgtcatccccagaccaaatccaatgaatcaccagatcctggggtagagtaccatgccttttcagatcgtgacctagtgcctctttagaattctttggatcggaaaccatcttgaaagtcaaaaccttatgctccgatacattgccgactctgccatccgaatcggaactggtcggttccagccttggaaggtgaaatgttactcaattgtcaattcttcagtgtctgcttccaaaccctgtagatcgtgataacagatcaaaggtacggagtaggtacataaagtggcctgcataattatgcttcttaccgcctttttctgccgtctatgtatctatgtataaaacttatccagggagaagatatgtaaaaaaaaaaaaaacattaaaccaactgattcatgtcgttctcaatgacaaaggccgcaaatgtaatcatgtggtccagcgcttaaagcaggcgtacggactgaacatggcttgcgtctaggctcggccaatgccgacttgtgatattcagtcccggaaaagcggaatgaaaactcttatattacatatccctgcacatgaaacttgcgcaaatgcaactaatcgagtcatagctgcaggactgcagagcacacaagtccatacctctcagacatgtcgtcaataaatattgacagtttgaacagctcagcagaatcgaggataatatatatcgactcccaaattgccaagcactcgataacaccagtagccagcagaccaagacggcagaccggcataattgcaccccacatttcgccagtccggggggaaggccgagtctcagccacagaccaggtcggcttagatcatatcctctttcatcccgcacatgggggaagtcgggggtcatggcgtacatgcccctccaaatgcgggggaaataggaaactccaatgagcgtgaatcattggctgtgatcgctggccacagggtatgataagtgaatatttccgcatgactaggggacgcgggtcctcactcgggccaaagtgccccatacccagcgaatttaattaagtcaccccgcgagaaatcgccgtttccggggaaaaattgaaataattattctttttttcttttcatttactttttggtacggtggcaagaattccatggttctagcgtgtatataccggtattctacgattccttctaactaatgtattgaaactgagtaagctcggaggttgtcgccaacttgggtagggctatttccttggaacctttcctatgtaggatgcctccttctactccgtacacctatgcctcttgggtgtgtgcttgtcacttctattcttgcgagagttgcggctgtggtgtacttagcatcgccacatcggttaaacttgcaaatatgcgacagactctacagacaggggcaagactcgaaccgcaagaaaaacctaagaaagtggcacagcatccctgcgccaatttctgtcgttccaaatccaataaacatgagaagacccaccactctggaatggcagcgaagatatctgcactagtcagtgagggtaatctatataaatgaacaggctagttgttagcaggacgggtgagccactgctggttctttgcctcgaaacgctctgcgctggcggtggccaagaaccgtcggcagtgaagctctacgctgaacctcgctgcttgagtgaaattcgactgatgctaagagaatacatattttgctgtgatacagcacagggagtagtatgtgctgtcatcatatagaatgttattggacaatgcatgtttctccctgcaggtactcatccgcctacagatagccagtcgtttgccccattattttcttccgatgtcagctgctcatgtataagctagctgcggcttgggaaaataaccaaggtacccctcgacatcagaaggagcatagtgactcccaaggttgtgtactccgtagactgctgacttggcatccaagactctaatgctccaacgatactaaccacttattaactgcctaggatgatcccgaggtcatgaaaagcatataatggcagttgatcaatggaatcgttatatcatttcatatctgttcagtagtgatccaattcgaattccaatcaaccctcacgcccccttgtctggaccagacgccgaaaaataaaagtagacataacatcataaaccaaatttgggtaaacgcaaatcactctgctgccggggaatcaaaaaagaccaacaaaacaaaaaccggaaaggagaatggagaaagaagaataaaagtcaaatccataaaacatctaaacaccaccacggcccatcctctcaatggaactcatgatcccgcctcgaccgggagtaggcattgcaatgccagatctgccattgccaccgctattgccacgagaatgaccgccaggagcaccgaatctagggatcctcttttccgtagtggcagggggacggatgcttccagacacagaacggctgacactgcgacgactttcatcaggggtgacttcgcgcgatggctgagctggctcgttgacgtggtcattgtgcacagaagatgccacagagggctcgcggtctcgaggctgagatgggacgggcggctgctgcatggctagccactcatcaacagcagcaacaagctcgcccttctcggcgcgttcagactccaggtctgcacgaattcgctcggtattttccttcatagcaacaatttctcgctgcagacccttaatctgggccgccatgacacgcttttcggcctcgtgcttgtcattctcgcgagcgaagagactggtattagccgcggccattgaatcagactgcgcggtatcacgttcgacgcgaagatgttcgttttcctcgcgtgcagcagttagcttcttctccgcctcgcgcaagcgcttctcccagcgagactcgtagctctttttcaaggccgcaaccttggtttcatgcttgcccttgtagagcacatgaagctcacgagcgaccttttcaacagcatcctgaacttcccgagcagtgtcttcagctgagtgagaggactgatgagatgagctggcgttactggcgctagatgcagccgcagcgcgtgcagcggaaagctgactttcgagctcaacaacttggccttctaaattttccctgtttttctcggcctcttcggcccttcgagacagacgctcacgctcacgatccccttccactaattcagagcgggcggaccgcagcactgtctccatctcattgactcgacgttcccactcggcctgttccatctccagcacctctttgccggcggcttcgttgcgcacttcttccagagcttcgccgacacgtctctccgcgtctgccactgcttgctttaggcttgcaacctcagcctcttttccgctgagagtggctttgagggaagatatgtcagacaagaatccggacttgagtgactccaattcacggggagtgaccgtgggaatggatcgaggggtaggcgcagccggaatatcaaagtccaaaagtgacgacatcttcccaggagatcgaatggattggcgcgccgatcgcataggcgaacgccgcgaagtagagaaacgggcactttgcatggactgacgagggaagaaattcatttgatcggtgaaatcaagcagattagcagagtcacctgggtgagccatatcacgtgggcctctgggtctcggcgtaggcgatcccgtaggcgaatttccatctatataggcactcgctctgtatgccctacgccctgtgcctggggtggtcggttcggcaatgtgtcgatgcccgtccatggtgggagctgggctgggagcgacacttcctcgcgttgatttcaccggcgactgggcgcgcagcttcgcaaatgtagtcatatcaggcatagcggaaaatgtgctcaagcaagtgtcatccattgagtcgtcgaccatcgaattctcgtgtgagatattctccttgtcgccatcttcatgaagtattgtgctcattccttcattgtgcctgtcctctatcatgctgttgccaattgctgatcggtcttgcacggcacttgcagcggaaaggacgctctgttcctggacactagggtcctcttcaacatctatgtggatcgctggtgcatctggtcggctcatcatacccttcttgtggcgctcgttcatctgtaaaacggcctctagatcttcaggtgtttggtcgtaagatcttttgcggggagttgcagcaactgggcgctggtcactcagtctaagtgatgcacgagaaattcggcgtgacttatgaagatcaagggtgttgtccttgggactcggccggaaggacgagttaagtactggagtaggggaagaagagttggatgctacctgtgacttcgcatgcgcatctaactttggggtatcaactgtctctggtgcttcgtcgcggacgggcgagttcggtgtcacaggtgaagaatatttagacactattggtgaatcttcttgcacatcatgtagttccgatggatcggctgtcatgttttttgcttcattgcggataggcgaactagagggatcgggtaatggccgcgattgaggaattggcgagtcactctgcatttcgcgcaagcgatcaaagtctaccgtctcttcccgcgcatcagggcggaatggggagctctccggatcttctagagctagccgccttcccaacccaggtgacataggctgaacctcgcgcaatttttgaaaccccactgtctcttcccggacatgaggacggaacggggaacttgcggggctctcctcctccaatggctcaagctctgggtatggcagaggagaagactgttgctcttcgtggatattttggaaattcactgtatcttcactggcattaggccggaagggagaactcattggctcctctacagccagccgcttgtccaagccagttgatatgggctgcagttcgcgcaacccccggaaaccaactgcaccctccgtcacatgtggacggaatggagagcttataggactctcctcctctagtggttcaagttgtgggtgtgattggggcgaggtctgtcgcatttcgcgttgcttctggaaatccacggtgtcttcgcgcccatcaaactgaaacggtgagctagcaccgtgttgatatgattcggcatcattgaaatcgtcattcgcgtgttcattttcgttctcgggttcgtgagggtagtaggtttcgtattcattatagccgttcggactcggggtagcgtgacttgtccatcctctcttcaatgggcttgagggagcaacattttccgagggctgatcaagggtcttgtgaaggaagggcgaagaattcgccatttgagattgtgcgcgcgcgttctggtaggaggatgagaggggcaagagtggatttgacattatcaaagccaagagaggccctcgagaacgagggtgaagattgttacaactgaatcgtgcgaataggtctctggtcttttttcagaactagttcgctggacaagaagagagcagagcaaggcagagtttgtgtagttatacaaaaagagttgcaaggttgccgtgttgacgttgctgggtaaacagagctagtctcaattgggaaatgtgcatcccaaactatctaatcggagtctcggactaggtatacaacacatatccctgtctttgacgacatagttcagttatatgaccagtttagctcatagtactagggatagaatataattgctacgcttcgatccgcaatcaagataccactccgatgtcttctttagatgtcttcctatatgtctttcaagcgtctttcaagattctttctagttgttatgttcttttatgtctccttacatattttttttagatagccttgctgtattggtataatatccagcagactattgaatacatgtagatagaaagcatgaccctacttggatgagtgtaacatacgagaaggacaatgccctagacgaagcctctgttgataatattaatgagatttatgattctactagtctagaactctagttctaaaaaagacccccattagaccctcgtttcctaatccgacaattacgcttctgtgtgcgcaccaccttcattgacaataatatgaacgatgtcgtcgtgtggctgctctggaagagcaacataatggcagacagccgctggctccacggttgctgatgaacgtttgtcgcgctggatgaaccacagctgtaaagcaccgaataatgcaacgagactactcccccaccaggcaagagcagtgcagccaatctcagctccagcactgtaaagcaagccagaaatcggaggcgcaaaagttcgagatgcagccccagcggaagcagcgaggccattgattttccccatgacggagtctgaggggctagcttgcttgatgagaatcaagaggaggggatagtcgataatggacaagatattgcgaacaattaaacaagcataaataccgacatagatgagttggcgcggcaaaaagaccaggaagggaaccatgaagtatgcaattggatggagcaccgtaacgatgacaaagagccgccagattcccaggtaatgtgccagcaaggggaaaatgatgctttggatcacgagggcaatgataccatcggtggacatgattacacccacagttcgagttgaaagaccgactccgcccgggatgtcaaagggcgagtggtgcgaaggtgatggccctcgggggtccttatcctgcaagaatatgggcaagagatggtcatatgtcatcgagtgataagtaaaaatagccaacgcaactacaagcataatgactcgccaggtacaagccttgggctttggtaatttctttgtcgcgggcgaggacccatcggcttgcacattccaactctcgtcattatgaaggtggacttggttaaaggtcccgtaagactccgctcgcaggtccacgccagcattggcggttgcaccagatgtaaccagaagcggctgctcagctgcctggtcgagatgtcgattggccttgccgggctgcatgtctggatgggtctcttgcaggaacagccagctaccgataatgctaaggagaagtaagacgcagcaaacaaggttgggcaaaaggtaggggaattttccaaagaggccatcggctgggaataaggatgggaagccttcagttggctttgctagcaagcctccaatggctgaatataattagcatttgcagtagaattctataatgggaagactatacatacctggaccgataatcgttccaattgaccaaacaaaaggcatgatggcatatgctcgagctggagacaagattaatccctgattccgctagatatgacataatagagatgtacttacgttcatgttctggtcgcttgacaagctcactaaccattgtttgaattactccaatgttcccattcagagctcctccaagggctcgaccggcgagggcgatccagaagttcggagccatcccaaccaggagcaaagaggccatagtaccgaaacttccagatataatgataggctttcggcctacgcggtccgaaagagcgccccagagcataccagtcaaggcctctgcgagcgaaaacgccgaaatcaaaataccggcatagaaggaggcattgttaccattggccatgtggaagtccttgaccatcacccacgagtaggggaagatagaagtcaaggcgataggctctgcgaccctgcatattgctgttatgttgtgtcagtcattgccaggtacaaacccgggatatggcatacctaggaggaaaagttgtgctgtgggaaagctgtctggcgacggatgtagtcttgactgtggtgtcaatgccatagttcttcagaagcagctaagatcttacggcaatccacccggcagtgtcgagttgatctctgcccgtaccttgtaccttataagcggaaggttttttttctttctctttctttctttctttccttctttttttaatatcccaagaatgccaatttcatttatctgagaatataggaggatcaaggtggggtgaggttgagaagtcggagaggggagaaccttggaaagatactttattttccacagccgagaacggacacaatctgatcctgacccctacctaaaggaatctggaactcttgatcctttacagatactctttcaaagagatatggatagagatagtttgaatattgtgttatactgtagtcttatctctccaaaaaaatctgagtggcgaaccatattttgttcgggtatctcggcaatggcccgtgatattgtattgttcaataatgattagttgtcgaattaataacagaatatagcataactaatgtaactatgacatatcaattatataatgttatatccagtaaacaacactgtagtctttcgatgttccccactctgctttcttatatcccagtcgaccaatcacaggccacataatcatttaagttagacctactccgtatagatcagccgcatatgtacttcacatgttataaatgattgaatataacgtcccttatatcatctaagccaaatggatcagtcagtaaaatgcgccgtcaatgacagaggaaccgcataagcggccggctattcaaggttatacttatgtccatagttgatagttgtatatgccgtgcctaccctggacatagatatattgaaagaaatcagaaatctcactattcatcgatctgaatgctaaacacaaagaatttctatccttgaccaaaaagtaagaaatgatgatatgaggggggaaaaaaaaccatgagcacagaaaaagataagtagagatgcgttcaccggtgaccaatcccctgcgccggctaatccacacatgtcatacggtccggattgtatctagataccaaataaagaaagccaaactggaaaaaagaaacaaaaaagaaacaaaatcaaaggattcacgaagtagcctctggatgcgtgggggaactagtgatttcgacagagcgggtctcaagttccttgggaagggttccagagtgatcatgagactccacatgagactcaacgataggcgtcgattcagagttcacttctaaaggctggtggaccgacggtgtggcacttgaggaagagccctctgtctgtagcttgttggaagtatcctcaacgtgttccgaagagtcttccactttctcctcatctccaataacagcagctagactgcggaaattgaacatcggctcaagagagttggtgtttccctctccagtaggaggaccacttgtgccatcctccggagtgatttccatgacagaggagagcgacgaagaagcgctggagacctgtcgcaggtgagattgtcgtgacggctcggacagatctgccgattggtttcctggtgctattggttcaagcagcgtaggggaattcgtttcttccgcggctgatggcaatgcacgatcaactcccttgcctttactagcagcagcgatttcttcaccaacgacatcttcgcctataacagaggatgagctactagtccccttaccaatactggactcgccgaggacatccaaagcggaggcgctagcattattgctgtacaagccagtcttgcgagccatcttatccgccttcttagcctctttctccctctccttctccctctttttggcctcctttcttaactccttctcctcccgtttgaggcgctcgtcttcactggccaagctcagtcggatagcttccatcatcatcatttcctcaagatcgtcgattcgattgcgtctcgagcttgatcgaggagcagccgggttgcccgctccctcttcggtagaagcagaatcggtgtcttgtgcagttgctcgaggtgtccgatcagcacccgtacgctccgtcaagaaagccaatgcattgagggcgggtgaagaggtccggccgtctccaccggtggctcttcgcattccgcgccgtccgatgccaaaaccccgtgactcactcccagatgcactggggttgatcaaatacgctgcagtgtggagggcggtcgctgccgcagatcgacgtgccgcgtgggctcgtgcattcgataatttggtggcccaatccggtcgaatcctatcagtcgtcaccacggtgggatcagtggcggatagcgaggttgcacggcggcgacctggaacggctgcggtggcggatgataaggaggaggtggaagataagggggaagtgaagttaggtgagagccgggccccggggtctgcagcataaatcaggccccgacggaatgagggtgatgaataggtgactccgaactccggctggacacagaagggacatgccgatggctccgagactaattgcgactcggtcgactcagcctgctctccctcagctgaaggagcattcgcgtggggctcgccatgctctggggggtgcgggtcagggcgcttgatctgcacgaagcattcggagcaaatgggttgatcgcagcatcgggtgtggtttaagtatggcggatagtagaggaaacagataggacactcgcttgcgtccttgtacaaattgacttcgatgggctgtccgttgacaaatgggtccttgggaagctgcagttcccggggcgttaaatctgtttgcgagttatgcttggtggtcaaagcagccaaggtcttcgcccttgttcggaaaagaggggaggtggatgtcccggatgcgatgggagatgcggagggtaatgattgaggggggttggaggactgcgaagcatctgaattaaaagattgcgatctggacgttatcggcactgtgagatgctggatatttgtcggatcggcagaggctttgtctgcggtcctggataaattgtgctccaactcgggcgggatctcatctggcaggggaatgggcatgcctcgggcagccgccataatctgatgctcagcccacgactccgagaagtcattaaggcctttccagaagggagccagtcgacgttcgatctaacccgcggtcagccttggctaaattgcatctagggggattccaagcaaacctaccatcagttggcgcaccactaccttattgtagtcttctgtccccacatatacgccctgcgttacaaggtagcctccatcgacatgctcctccttcatactgcgctccctctctttaagacgagccacccgttccttctccaagcggcggacctcacgctcttgttttgtctcccgccgattctccagcgtggccacttcacgatcatgactgctgccgattccaagaatcgaaaggtcgggcctactgcctcttgctgcacgagaaccttgatatggccggcttgagccatcggaagcgcccggggataattgacttcgacgacctgacggggctgtggagcgtgactccttagtctgggagtttcccatgttagagcccagatagatgtaataaggtggaaggatggcgagattgtcgggttcagccacgacagttccgacagtcacggtgataactccgggatatggcggaaagggcccccaaggggggttgtattgggggtgggcagtagaaatgggtgtaaagaagatggagaggtttaaaaaagttgaaaagaggctaatagagagagtggaggtaagaggagtaactttcagagcgggggggggtttgtgatctgtccggagtaactggggaaatgagatcggtgaagactttctaggacaacaacctccatgaggcccaaatgatatcaagaatatttacaaattcgagattgcaatattctgatattccaatagaaaagatagaaagatagaaataccggatgtggcggatgttatttttgttattttttaaatttttttcttggggcaagtatacctgtttgtctcatataatgcctaactagactagttatgggaattactacaaaaccacataacatgtatttatacatatctatagcatatgataggtaggataaacaggttaaatagcataaatatcaagctttttactaattctcaactcaagatcatcagttgatccatcgtcattgtcaagtcatgggcagatacactccacttccaccactattgatagtgcgatgtagacatcataggctctaagatgtagcaaaatgattgtagtatagatctcaaaatattacaattaactgtggaagtcaactagttagttaactactccgtacgtgcataactagttgattagttactggaggcaacaaggccaattcaggccaacacttaaggccaacatttgatcaacctcggaacaacctcagccaataaaatctacatacaaaaggcggtggcataaataagtctacattatttttttgccaaagaaaaaagatcgaagagcggtgttggaccaaagcttccacaaaattattttggaccttgacatcctgcataggccatgcagtagtgatagctctactcattctcactcctaccgagaatcctctggcaatgactgaaacgaccagactacatatcacgcctttcacccaggatatccttccgtctgtgctgccagcatctattcgcaacttggccacagacatatctttccacgagatttctacattcccagagaataactacggatacgtgactctgccaaacatggaagcggagaagatcaagaagaagttgaacggctcgatcctcaagggcaagaagttcaaagtcgaggcggcccgccctcaaaagagacaccgggaagaagaagatgtggtgcctgaagccccctctagtgccaagaagaagtccaagaagtccaagaaacaagcgcccgatgacggtgtaatggaaggctttgagcttcccgccgaccgcaaagtgaaacgaggttggacggagtccagtgatgctaagcaagaacgacgaaagtcggagaagaaggacaaaaaggacaaggaggagaaactgcaacccaagtccaagtacaccgacaaatccgaatgcctgttccgagcaacaatcccacccaaccgagcatccgacgcagcttccgatgataagaaggcaaagaagaagaagaagtcgaaggataatgtcatccacgaatttgagagaacggtgacccagccaagcttcctgcgcaccgcggaggaaagcgcagcgcctacggctacatttgaagatggaaaaggctgggtggattccaccgggaatctgaaagaacccgccagtgagaagatctcgaaggataactatcggcctggtcagatcccaggggctaaggagaagcgccgagctgccaaattggccaccaaagatacgaagaagcgttcgcgcaaagaaaagactccagaggaatcttccgagtctgaagattacacctcatcaagtggctcatcttcagacgagggcggtgactcagagagtgaggtcgatgagaacaaggcagatgaaatccccgaagattcatctgcatcctctgacgatgaggaggaggtcaagccgcaaccccaagaagagaccaccaagtctacagaggctaacgacggtgatgctgatacaccgagccagtcagactcggataagatacccacggaggctgcgcaagaagtgaaaaaagattcacctatcaaggaagtccacccccttgaagctcttttcaagcgacccgccccaacaacatccgataagccggcaaccgaggccgaggctggattcagcttcttcggtaatgacattgaatccgaggacgagtctcaaatggctgagccgcagacacctttcacacccttcacgaagaacgacctacaaaaccgaggtcagcgcagtgcagctcccacccccgatactactgcagccaatcgacacatgacgtggaacgagagtgaggactcggatgatgaggacatctcgatcgacagccctgtcaaaaaagctcgcgcggaagccggtgcaagcatggaggaaactgaattcgcaaagtggttctgggagaatcgtggtgagaacaatcgcgcctggaagaagaggcgacgcgatgctgctaaggaacagagacagagagacaaccggaagaagggaatcaaggcaaagtcatagattcaaaatatgtacctagatctgatgtggtgcttatacataaactatgctgctagtagccttcaaatgacacaaacactatgtaatttaagccaacgacgtttccaacgttggtcaaatctaaatataaaaaaacctcatggtctttgttggattgcgtacacagtcatgtgacccgcattcatcatcattaagctcatccaaactaggactcgtcgcatcgtccactacgtgcccaggatgttttcgacctggacctcacagcgcagcatacagctgttgttgctgcttttcacatttttgtctctcacgtcattggtagcagcatctagtaagtgctaggctctcttctccgatgcctcgaagcgccaagtcgaagatcgaattgctaccatcttcgcgtcgatatctatgtgatactaatactcaatgctaacagcaccaacctccttctgcaaatgcacctgtttctccaatagtacgatcatccccctcaatcctgccaagtccgaaagctcctccggcatcgaccacgtccgcttttacgagcgcgactctctcagctccgagcttgagcataccgatgaatacagcaaacgagccgagaaataccgatctctgaattgtaatgattgcaatcggaaattctgtctcgactacgagctaccaacatgcaaaggcgctaaggaggaagatgtgtatacgacttgcttccgtaagtgatttgtcggactagcgaatcagccaagagaaatcgaattggatactataacagatttgctgacggatctgcggtactagagcgagattcacggaaagacgaggcggtggtgtttatttttatttttgctaccggtggactgctggcttgggcagcctgcaagccatggattgagcgatatgtcgaggtaggtcgatgcaaagcgagatctgtgagaaacccgactaactgatttaggctgcacgagaacgcaggtcgtatatacccgttgctgaacccgatcgctaaatatgaaatgatttgatatgattttgaatgtacaattttgtaggctgaaatatctagcaaagagcgtataattccaagacttgagactaaattcatcaacatatacaacatacggagtagggatgatgccatggggaatttgagctcgatatgatatcagtaggaggaatgtactataagttcaggggtaaacacatcaacacttatcttagtatacctcactagtaacatactcgcataatctacttcgtactagttagtaagttgtggtagatagatctatttatttagctatttagcgcttctagattgctacagatccaatccccactacggactatctgaaacaggatagattgggggttatggccaaccaatagatccgatcagccagagagaatgtgatttaataggcattgggggatccttatatatgtgcacacattggatcggctaacaattgccaatcgagtggattcagagagaaaacttgtttaattaaattaaatccttttcttgcttttttttctctaatcttcctattcttctctccttaaattgctctctcttctttaagaggcccgatccccttcatatccatatcggaactggtggcgttgattttttttgtaatatccagcgatagtatatactggaattcaaaatatggctatcttcgactcagaaaagcgccctcgtggccttcgcgtgccctctctcgcagcattcaagtctttccagaagaaatcgtcggaatctgtgcccaccgagcctgtgccctccggggagtcaacttcgcctaaagcgacagccttccctacccctccaccaccgaagccggcgcccccgccgggcaaggacctcccagtgcccccgaaagaggaaattcccacaccgcagacctcaaccaacaacccatacttccctccgatcccctcccaaaatgcagtcccagaacgacgcccaattgaacgggtccccaatccaacgcagtctcctccccctcggatgacaggcctgcgaaacaagaaatcacagcccgatttccacgtaccccaacaacagacaacaaactatttcgcgccccaagctccggccgacgaggccaactcccccccgctggaagacttcatcccgaccccggacagcgccgaaccgccactaacagtgtctgaactgccacgcgatgagctgtccccttcgcccttcgtaccaccggatgttgaacccgtggcgccgaaattgaacgaaatccacctcacatgctaccagcaacaccgcgctatgcccgtagcgcagaatgcgtggtgtccgctgccgtgcatgacttgtcagaaatttgacattgagatccggcaccgttgtgtgttctgttgcctgcgcatctgcgagtcgtgctatcagactctgcaaaaatgcaagaatcgatccgtcgaagaactggtcgatcggctggtcgtctgatttgttgatatctcaaggtggtgttatggtcgtggtgcgttgacctgaatgacctcagcatatattgcatgatctcttgcgcaggaagtacagttcctgtaaggttgtcagctatgttttctatttttcttcttatctgtatacctttttttatgataccaagagctcgtgtatatattatgttttaatcaggaggaccgaagctgcatgttaatatgaatagatattctttttttggggggttccttgacataagtgtagcatttcgtagagatatctgagagtttggagaagctatgtgctaggtcagcttattgccgcgtcaagaatactcccatatggtacaaacgtttctgagagatcaatcgtgatcctcctcggtcagaccaggacacccttccagctcaagatccgtttcataggcatatttgcaccagaaacaataccgatatgtctcgcgcagaaagagaaccagcttgcgtaaccgctcagctggctctaacgcattgaaggcatcgagctcctcgtcgtcttcttccagctctatctccattgtggaggtattctgatccagttcactgccaagggcctttttatcctcccgatccatagtagggtcatcgtattctggtagccgtgctttggggaaaaatgaagaagggagtgaggattggagagcatggcgtgtctgacggtcactgtcgttcctttcccgctcacggatgagacctcggtatagaacgttgatttgcgacgtgagcttgattggcttcttctttgtcgcggctgcgttgggtccgtcgcgtgcttgactaggatctgcggagtcaccgccttctttgttggacttggctgaggaccctatttcttgttcttgatcttcgtcgatgatagccccactctccgattccgcatccagcctctctgcaactttctgcgcagcacgcacctgcgcttcgatgcgtctcaactcgcgctcttcacgaacgcggtctcggtaacttccttcctcgtgtttgattttctttactgcttcttctgcctcctcacggagcttgcgttttttttcagtgtccaacccgattccgccgcggttttctttcatggttaggttcagcggttcagcgcgcgcctttaggaaagaatcggtagtgacactgccagaatcgctcgctgcaggaggcttgccaagcaccccaccaggcttaaagccaagctttgccatcatttggaatcctttgttggtggggttgagggtacttgtggccaaggcttcctctcggcgggcggcttcccgagcagcgcgttcggctttcgatgggactcggcctcgagcttcggcctgcatgtggaaaagaatgttagaataggtttggaatctagccggagacagcgttgggctagaatgtgaaggatacggcacctctcgtagttcgcggcgctttttttgtgcgaaggtctccttttgagagggctcctcaatgaccatattcatgtagtcgtcttcatcttccgaggccattgtttcggttgccaagagtcaaggtatggcctagacgctaaagaaggggagagaggaagaggaagagatccgcaggcggacaaagaaaacgctttgggttttgcggggaactacggtggggctctgattaattaatttggaggctctgattatatacaacgctattacactattaatgtacactatataacatatattatgggattatagtacttaagaagaaatatatcaggtttagtagcattttcttcggtcttttatcggggaaaaatgtggaaattcggattaaaatcagctagttatatgttatagaccaaaacaaagacgctatttatgccaaggatcactgtctatctttgtttatatatttagactcgatggtttcagatgtttcccaacgtctcacttatgtttcttaccttaaagactatatagatatactgttgcttttgtaatgaaatacctcccaagagcatttaaaccatgattttcgttcctgttacttacttctgaggccaaatagcctgctcaccgctaaaattacatacctattatgtctattatggatggtgttcttccccgtaaagatcccttactgtacatgtgacacatccccgcaagcgtctgtttgcatatctcaatgaagcaacagtggcgcaagggctttgtctttgtatcactgtctaatagctgagttcggtgcattgtcaccgtgacttcgatagacaatgctcggcgttttctcttgtctccgcgggaccctttataagccatggcatcgaccggttgacaatcagactgtcagtcaccatggcgattttcttgtatatctgctctttgctatctctagcatctgcttctacggtggtagatctcggctatgctagctatgaaggtcgcacactatccaccggagtcacacagtggcttggcatgcgatttgctgctccccctgtaggtgatctgcgatttgctgccccgcaggatcctttgactgtgaagggaatacagcaagcaaccgaggtatacatctcttgtgttcggttatctataggtggctactgactattcactgctagcatggaagtatatgcatccccacagcagcaagcgaaggccggacagtcccagcaggaacatcagaagattgtctgttcctcgatatatatgctcccacagccgcagcaaaaggctcaagcaaactgcctgtctatttctttatccaaggaggaggctttgcacttaattcaaatgccaactataacggcactgggttgatcaaggcatccggaaacaatatggtcgtggtcactttcaactatcgggttggaccgtacggatttcttgccggagatgaggttgaaaaaggagccagtctgaacaatggtctgaaagaccaacgcaaggccttgaagtgggtccaggagcatatcagcaaagtaggtcaagccgtcattcctcatttttttttttcgtggctttgttgtttgatacctggttttgacactatcccagtttggcggagaccctaaacatgttgtcattggcggtgatagtgcaggtgctgcctcggtgactctcatgctctcggcgtatggtggcagagacgaaggcctgtttgttgccgcagctgcagagtcacagagctttgcccagatgctcaacgtcaccgaaagtcaatttgcatacgacgcgctggtaactgcaactgcatgtgacagtagtcaaaataccctggcatgtctgcgcaacctcgatgtcaatgctttgcagcagaagaacatcaacagaccatacccaggagcaaaggggaagccgttatacctgtatagccccacaatcgatgaggatctggtgccagactacacgtaccgcctcttccatgaaggcaaattcatcaaggtacctgtgatatttggcgatgacaccaacgaaggcacgaaattcgttcccaagagcacctccagtgtcgatgaagcagatacgttcatccagaaccaatttccagcaataacacaggcccaacttgccaagctcaacagtatatatcttactccaaaccagaaggagacattccctggcgctggggcctactggaggccggcaagcacggcgtacggcgaaatacgttacatctgtcccggaattgacttgtcttctatttacgcagcggcaggtgtcccaagctggaactaccactacgcagttcaggaccccgccaacgagagctcgggagtgggcacacatcacaccatcgaagtcaatgcgatctggggtccgaccaatactaaccaaaaagctccagcttcgtactacactaccaacgcacccatcgtgcctgtgatgcagggttactggacaagcttcattacgtctctagatccgaacaccaaacgtcttccttccagtccgaaatggcagacctgggaccaaggtggtgatgcatatcagcggattttcattcgaaccaacgagacgaagatggagacggtgtcacaagcacagagaagccgatgtgaatatttgactagcattggtcttgatttgaagcagtagcagtatatatacccctgggagtaaatgaatttgtgatctactgaggtcaggccttttaactaatcgaactcctactaaatgaccatgaactacttaggtacctctacatagtgtttttctatgccgggtgcgtatgtagttcaatctacgggatctttacagcaggagatcgatagtgcacctaagcactcgtgaatcagtgtcggtctccgctaaagtagacgaagaacaattcgaaagggctcttgtgcctagtccccacgacctattccaggcaattgaaatgcttgcatgcgacagcggtcacctgggaattaaagtccattccaaggttaacaccagaatgccctcaccaaaccaagattctgatggttccagggttccgcctagagatggaaccaagaagtgcttgtttgtttcgtttattcttttctttctattctctaaccttggaagtctcaatcagggagctcaacatggcctaccgagacaatatcgtcgtcagaggaacctaacacagtcttccctgctgactttccggtttgtaaccgcctgagatcatcaccagcctccgagaaatccaagagagtgacaggagaaggtggggagataatcccttccagatagaactgaagcgtgtctgctaacaaagtctgaatggtgggtggtcgaagtttcatcatcacgacaaggtcccctgctgcggaagtaaagccgccggtaaatggcttcatgtcaagtcgtccattgccatatatatcgcgttttttgagctctatgagcctccctaaaggcgcaatgcagctccatgagtgacgcaggagttcaccaccgagggagttcaaaacaacgtcaacgcctctttctcaacatctagaatgtccttttgttcaaggcactcaaggtccttgctttcagtctacccaatggcaggtagcacttctgtcaagagttcgatgacttgaatccacatgtgtaagaacgacgtccgtgaattgaatctgcattgttgaagatgacttgtcccaaaatgttatgtcgcttttcagtttcttcaaaaattcgagtgtagcattgtgacacagaaactcgtggctaggctcgctactgacatcagacgcaatctaaatttctcaacatatccatggatgccgggagatatacaaaccgtattgttcatacaacaatacaaactctattgttctgtgaataatataaaccctgttatttacggaacaatacaaatcctattgttcacagaacaatacaaaccttggtacctatccgccaacctctggggtataaacagggctctcatacttcttcttcttcttccctccccacccttccaggtttcttcaagtctttacactattcatcttctgctacaatcttcactctggtatatcacttcactttgtaccatcagttcactccagtacatcatcacttcttcactctggtttatcacttcactctcagtcgtcatcttcagtcatggacccctcagtgccgtctctagggccttcaggccttcctacacccccgctgtctcctcgaaaacgacgccgccaccttcgtgagtccgatgatgcagaaggtgacatgagtcttgagcagtacttgcagcgcgtcgaagtttaccgatcgaccagtatccccagtcggtttccttcgccagtaaaactggaggttctcccttctcttgagaaagtactcaggccactctaccctgaagtcagttcgatactgaaccaacacaatctgccggggatgatgatgtatcggtgttggaggatgaccaagccggggtatccccgtggtgacatccccgtcgatattttcagtgtcctccttgatacctcgactccaaacatctctcctcttggccctatcaaagacgagatcttgagcctcttccgtcgacacaaggtcagagtgcatgtcgaaatttcgaacgacaagctctgccaccacccgacatttttctctatcgccttaaaccaccctcttgtcaaagcatacgaccgagtcatgcagaatcttgtcgccatcctgaagcagacacttggttccaacttcaatatgctatgccccttcaacgttggtccgaatgaagccaaggcgcagccgaccattgtggtatttgtggagccatggacgattacaaactggtttgagctgcgacttcaagtcatgtctcgactcttgccacacatacaagcggacagctttgacatcgaatttttacccggcgccatgtcattcctgaatggaggcggcattccgttcacacacaacgtcaaagagcatgaggttccccgaatgggatcctcgatcggaattgaaggagacaaaaacgccggaacgcttggcgggtttgtgacattgactcacggtgatgtcgttcgtagaggttttttgaccaattaccacgtggtcaggccatcgccgtcccaacgcccctctgacagcaacgatttcctccaaagtctcgaccgtttcggctcctcccctgtgcgccctctggccaacaaaatcacgatggaatcgccatctggccttgataaagacgccaccgctgcccacatttccgagcgcttagaggcaatgcgcgaacacgagactgaactgaatgccaaggtgcaagagcgagagctactcggagctacaccaaatcccggaatcctggaggcgctttcaaacacaaaagattctattcaagaggcgttgcttctacgttcagtcgtcgaccgaatgccgttcagcctaggtgatgttcagtttgtgtcaggatatgaagtgcacggtggtcacgttatagactgggcattcgttcagatgtctaaagccgccgagccaaagttcttcaggccaaattttatgccatcggtccctaagaagtaccagccagagaaatggagcccgtctcaaaattctgcaatctggctaggaaagaaacctctcagtgagtttgggtcacttaaagatggggattggtgttgcaaaaaaggtcgtacttctggctttactgcaggtgtagtgaacggccccaaagcatactgcaagtggaatggccctgaagtaagatatactccgagcggacaaaaagttgaaatgcgtgctcttgaaactcaagagttcgtcattgtgggcaaaagagctggggtaaatgaggaatcgttctgcacggacggggactctggttcattcgttctcggcgagagtggagaggtcaagggtttgctgtgggggggtatggagaaagacaaatggaatttggggctagcatcaagcatgcctgatgtcatggcttcgatccaggagaagatgggagggtccgttacattgagccttccggcttgactcattgatctttcaaatctgtggacatttgcttccaaggttctgtgcttattgaactctagttgcattgcttcgttgaaccccattgcgtttttatagcttcatttgacgtccagtaccatgtgccctgacataggacgtatatttatacccgagatccgtactcttgtaggtatactgtatacctgggctggtcatagaagcaaagtggcaaatcattatatgcgatcaagattgccgtcgaaggagaccgacggagcaacaaataaaaagaatctaaacaacaaaatatctattttttagcactcagatggaaagggaaggccaagaagtggcagaggaaatccgctatctaggtagcggattttgtagatactgtagatcttgatgaacttgacttttattcccacccttacgccggatgaataatgatatatataccagcccaacaggatgtacaaccatgtgtgatatatgaaaaacagatgtggaacataagttgaaatgcaagattacttcctgccacgcgcccgctcgtactcgttggcagcacggccctcctggctctgaatctccgcaaccagacgcttgtacttcttctcgtactcggaatcgcgctctttcttttcgcgcagctgctcgcgagcaacgaagctggcgtccttgcgaagctcgcgcatggcacccttgcgctcgcgcttgaactccttcttgagacggttggactcggcacgctcgcggtctggatcgtagtgcttgtctgggttgaagttctcctcgaacttcggaatggctgttttgatggccaagggtttgtggtcgtgcaaaaacagcggacgacgaacaagacgagcttgtgcgaggtgggaatcgatcttgttcagggtgctctggatgggttcccgggctgctgagtataccttgcctctgagggattggtggaggtgctgcagaacggcacggaccggtgtgaagatctcggtgaaagcagatttctcggcccaaatatcggaagcggagccaaggagagacacgagagtagcgaggagggagatcttaagctcctcctgcgcctggggatcagaaggagaagtggtcacgtcgcggaattgcagcttgcgaggtgtcaccttcttggagggcacgagctgaacagattcctgtgactttctgtaggggaaagctccaaacttgacagtcggttccgtgggagcaatattgcagagagcatttagagtgtagttgataaactcgggcatatatctcttcgaggttttttgatattggagacaaagactcgcggcatatgtaccacttgcaaggtctgtgagcgaggcggtggtgcactgacccaggtaacgcgctaggcatagatgagcgggtgtggctgtcgtatggaagtgatcagatgtggggaagaaggtcgagaggccggtaagcaagatgaggtcgccgggtaatagattgagtgggcgttccttgccaatctcacgaagttgggctcggcacgcaattgtcacattcaaaggatgggtcttagccaaagaatgaatgtgacggatgatactctccagaatggcaaatggaggttgctcagtctcgttacccatgtaagaaacatgctcgacaagaacttcagcaaatcgaccaagcttgtccttgtttccaggcctaagccgtggatggtgcaatgctcgaatgcgctggataacagtcgggatttcctcgacaggtacgttttttgtgatactcaggaagctctcatggtcttttggacaaggatacgtgaatgcgagctttccgtttgcttccttgttaatctcggcagcagtcgaagccgcagcggaatcttctgtcggcagcgtcattccgttgatgagctcgtcctccccatctggcccgtcagactcatcgctcgacgaagcctcctcatctccttccatgtcactgtcacccatgtcgaggctggcattcgaatctgtctcgactagatcttcgtcgatgatgaaatcatcttcatcttcgacgccaagttcagggcgtgtttcgctagggtaagctggaaggccgaaatgcgtagcatcgtcaatttccgactcgtcatcatcgggaatttcgtcctgatccatactgtcctcttcgtcgtcagtgagctgctctccacgcattcgtcggaggcgatcgttctcaagtttcttgagccgctcagcctcttcctccaccttctcctcttcggtcttcgtgcgatctgtgggtcttgatcgttgatcgaatgtcatctgtctaaggcgctgatcgtattccttctctggatccttgctattttgcgactcttctagcatagcagcacgctctgggttcatctctgagaaatcctgtctgggtgcctctgccttggtcgccttggctgcaggcttgatgccccgcagagcctcgaaaagatcaggaagttccttatccaatgcttcccgtaggtcttcatcatcatctttggtctgttgccgttccgctttgtagaacttagacttggcaatgacttctttcatgacctcggccttagtctttttgcgccctggctgttcttcgtctccatagtcaatgaagtcctcatgatcctgatccggatccgcatcctggttttcatcaccatcgggaaatcgcttccgtttccgcgacgtttcctcgtcggattccgcgtcatccaagtctccggcctcgaagtcgtcttggttcgctccatcgaacgacaaagattgacccatgtgagtaagctgcatctcatcatcatcatcctcgaggttgaacatggactccttccgcatctttctctggctctctctcgcaaatctctcggcggcccgttcctcgggtgtcatggtgggatcattctcaccgaaccggcgatcgatgagtccaccgatcttgtttcggctgttcatctctttcagaagagtggcgcgtcgctaactaaagttagctttataatcgcaatgctcaaggaaagcagataaacctactctttcttcacctagtgatttagtaacacctgggcgagcgccacctccagcggtcgtgttaccgtctctggttgtgacagcaaacttgctggatttgtttatcgtcttgatctcgaaagggttgaatcgatctcgaatggcttgcaaggcgacctcgcgctggttgcgattcttcgcaccgactccggtctttgcattttgtcgtttttctttcttggacttctgaggaccaagaactccgttttcacggagagaagccttcagctgtttgagctgagaaggcggcattttgtgtgattgggtttgaattcgagagttgggagtttttttccccgtcgtgattcccatcaaaaaaatcaggtacaccgcctccgcggtcttcgtcgatcaatattctgccgattatgttctccgcatctctccaactctcacaaccggtatggctcccttttctggggatggtgtgctatggctatgcctaggtatggcgcatttgtccgaggaagcgattttggctcagacgattaacttacctaggcgtctcattgttctttgccatacgcggtatcgctacagacctccgtcaagtcgttgacctgacagaaatcaaacaaactgagaaggaagacaagattattagcgagggaacagaagaaggtgcgcagatatttatatctaatgcattactgtactaataaatcctatagctctcaagttagacaccctcttgaagctttctcaaagcacgagccatgacctccgagctgcgtacgctaaaacaacgttattttgaactctgtgcgtcagctaatactacacagggcgctgcgcatcatttcagagcgttctaccaagggagatactcgtgatttgctattggaggaactagcgtccaagaacaaagttcaccaacggcgagctctgaatgcattgaacttcttggtttctaaccgggcccgtatgcttcccaatatgcatcattttgacagtatatagatgctcatactatcttccagtcactcgaacctcgatttgcactcgactcgccgacgtacccacctttaccgccattatcaactgcctttgcaacctactagaagaacacgtggagaagacatcaacgaccaattcgcctatttttccaaagacacggccgatgggagaaaagaaggcgctgaacattttgaatgtcttgttgccagagaacatacccgacgcattggaggcggggatcatcagccgatggctctgcagatatccattcccgtgtgcaacagccgagccttctcgccggcgggatgtggtgatcctcatgaaaacatggtggtcggatgatgtagtcatgagcgcgattttcagtgcgctttcctcgcacccggatggaatcaagcagctgcggaaacatggactgatgggcagcatgatcgaggagaatgaccaggacgatgaggatgatgcggacagtgatgtgtggatggtagacgcggatgaggcaggaggatcttttggacgatctcgttcgcgtagacagcaggaggggagtgccgaagagcaagcgcttcgccgacgcaggagagaagctatggttttgagcgacggtggacggccaattggaaatggagacataatccaacgacctgttgattatttatgatcttcaatttgtctgcaacactacgcaaccaaccgactctcaaaactagctttccagctactgtactttatgtccatgataccccacgcaagaaatatgatatgccatgaattttctttgaacctcaatataatactaaagccccatccacgctgatttggctaagtggtcggtcttcttccgactgttcttgataacaccgaacgccttcaattctgatagagcgccatagaacaaagacattacaactcggtcatcgcagccatcagcctcttcggtttcaaagacaccatagaaagcctgccagagatcatgaacattcaccagagcgcccgaatcaaggtacaattgataaagtatcgcggtggcaggttgcttggccgagacctttgtcatagtggcatccgacgaggaaagcaggtaatcaaagggagtagccagggcgcgctcgattgcaaagcgcggcctgggggcgaatgtttcctttaatggattccgcagatcaaacaagaaggcttcatgtagaaacagatcttgtgggttgataagggtttctgtgagatatacttgcaaaagagcaaccagtcggtcgacgatgttggtatattccacagcttgttccgatagatcggcttggcctttgcttagccggatacgctgctggacgacagtggttcttgtgacggtgctgttgatattgtatccactgcgcagtggaccggactccgggcacgtttccaatagagtcttgagatcttcttgaatcgcatcggcttctcgactaattaatatccctctgagacgcacgagaagttcatccagcttatcagaatctagggttttggctgcggccaccatttcttccacaatagtggactcagacagttcgccagagagtgcgcgaacagaaaggtccggcacagtagtctttttcgcgctctgtgtgtgttcaagacagacatatatgacacggactgcctggaacatgcctcgcattctttgctggtttgcatccaggtacttgggcgtctcttgaataagatattcgtcatcctctagcaaatctcggatttgcttgatagagccttcttcgactagatcctcacagaaccttgaatcatattagttgagatataacctgggaattggagaatcttacatccggaatgatggcaggtttctgacggcctcacatagcttgttttgggcgagaaccgtagaatctgggttggctaatagtaccgacagaggatttgcaaagaaatgagacatgtatgcatactgcacgaattagatttctgttttaaagccattgggatagttctcaccttgaccatgcggctgaatgcctccggactttgaaaatagtcacttgtgttttcaaacagagtattggtaacgttgcgacccagccatagattggtgcctgagtcggtctgcagagtctcatagatgcggtcgacacagttcccggcctcttggacctcgaaatgcttcccttgaaggagagcaacgcacgagcgaggcagtctgccttcgaacagctctacagaggtagagatgcctaatagaaccgtgaacggtatacggtcaagccatgatctagtagaaggtcagttgggagatcgaccgaagtctggaatgtcaatcgcacttgaatagagacagaagatcagtcaaaaggccagggtcaaaagcctcgctatctcgaagcgctaggaccaatttcttggtcccctttctctgcacatagtcgtgaagaagatctagatcgtaaccgagaagtcgagggccctggtgaatggttagtacaataatgcgatgtttttgattcgacatacagcacgatctgtaaggaacttttgatatccatcattgccatcggtgtttgtaaccgcagctcggatgatgttcttcaacgttgttttcagattgggagcatcgcctgattccaataccacgacgctgccttcttcggtcgatatcaattgaccattaagccgtgatagcaatctgctaagcgaggaaacatttgatccaactgtcaccaaagctgtaggaatacatccatcacatctaaaaccctagttagagcacgttcgtggatcgcatcgggatagggacgtacgtctgaggtgaggtgtttctgacaaaggacaacacatccgccaaaactgctgaatcgacatcctcgaggatattctaaactcccggtgagcaatatatcactatcggtcttaattaatttgcccgactgacctggatcttgttttcttgctttgaccaaagctcctgatacgtatcatatcgcaattggacggactcggcgttctcgtctccgtttaaaaggggcacaaagcgctgttgatcagcctggtcatctcttccggtagttgacgagactttgcggcgctttgaaggtcgttcgcctgctgattttccgtgtttgggtggttggtagatgtacgaaccctgggatgatttgtgagcgcgcaatcccaagaataccatgccagatccgaaaacaaaccaggttttggggcttgtcatttgacaagcctaaggcatcgttcaatccatcagcatccatactgctgctcgaaagggcttggttgtcgcaatggggatgacttcaagggcggaagcgcgacaaacgctaaacctaattaggcgataattggttctcttccgaacttgaacttcttcacttctccaacttttctggtcgcattcgatgaccgattgacttcagacttcagacttcatgctgcgccaggctattcaaggagcccgatggtgtcagcatgtggcccgcagcccatcgacacgcgctccacgccggaccttctccgccgtagctccgcggcgtcttaattttggcggaccgaacgacaaagtcacattctacgaacaagaatcccccgaaagcaaaacacgtcgaaaaatcgaccccgaagccgaacagaatgaggaacgagatgaggtcaaaaaggagctcgctaagatccaggatgaattgaaggtcttggaggagggaccttttgctcccaacagccctttcatcaagagtttgccagaaaaggaaaggaagattgctctagaagctctgaaaaaatatgacgaggaaaatcccgagccagcagaagaggccgggttggagcaagtttttgacaaagagcttgatgatatgctacgagaggagtttgaaggcctcgcgatggaagaagagaactgggaggatggcgtcaaaaatcggcgaaaaatagctgccagacgatctgccgcagcaaagcgtgcaggagcagaagctcatccttacgttataaagttcaataattctctacgactactccaagaaaagatgtcagacgagcgggctcgacaggacttatggaagtggtaccgacgatgcaagcagaccatcccagggtttttgacaataatgcctgagagggcactcgaaacaatatgggattcacaagcaataggagagtctgaccaggctacacgctcaaaacatttgcaaatcctggccaaggacgctacatctatcggccaagaactggctacgcctcagatcctgttttatattacatctctgcataaaagtggctccaccagccttgcactagagcaatgggaggcatatcaagcggagttgtctcagaagaaggaggatctggaagagtactggaagctcggagtgcgattatttgctgcagataacaacccacaacgagctcaagatattgctttggctttcctggcaaacgaccgaactcgtcagccgcgtgtactcattcctgtcatcacagcatggggaaggctgcccggaaaggaagctgaggtaaaggcttgggcactttatctgcggctgaagacattcctgggctctgatatgaccatggaagactatgatgaaatcagcattgctcttctcacggctggtcgattggatactgctgttgcaatcttcaaggatatgatggtgacaggaaaagacccggccaatgactcaactgctttgtacaaagccgcattgggcctggcgggtaaccttcatgcatcgagcatcaatgaaaatgaagtaaacaaggtctctttgtcggcactcaaggtgttacctcgccagttccaaaaccggttcttctatgcaagttggatgaaaaagctcattggtatgggtgaggtcgactctgctgctctggtgattgaacttatgtatgagcgatgtgtcaagcctgatagcaagcacttgaacggaatcattgccggctggctccgtgatgggaacacgagtgcacgcgacaaggcagagcgacttgggtgggccatgattcagaagcgtatcgatgttgtatggagacgatacctaccagccgagagttccccccggcttcaagtcaagtatgaggagacagaatctgtacgcatgcctcggtttatgcagagagaggtcccacctgcgagcatcgagaccttctctatccttcttcttcattacacacgccgaggcgacgacgacatggtcaaatacttggtcaagtctcttagtgatgcacacatcaagccgaactcttacttcatgaaccaccttctatacgcagagctccgaaagcaagacgtgaaaaaactctggaccaagttccaaacaatgtctaccgccatccggcccgacgtggaaacatatgcctgcctctgggactgtgccaagctccaatacgaccgtggacgtactgctttcgatgcggacttcccatcagcacgccaactctatgccaatatgatgtcctggtactcccaattatctcctcgcactcagaaaaccacccgagcgcagattcctagagctctatttgatcagattgtgcgatgtttctgtctctctaaagacgtccccggcacattagtggtcatacactcgatgcattcagccttcggcttcgcacctgatgacaccaccgcgcgcatgatagtacttcaaattgcgcgactggctggtgtaccagctgacactcccaaacggcgcctccgccgcttgtcttcgacgccacgaagcaaagaaaatatcagccaggttagccgtttgctcgaactgttgggtaaccgcaaagccgaaaacctgcgattgcaaggattgagtcttgagcagctagatccacgtgagatggaacaataccaactagagatcatggcaagtctactacggatcgtgatgagccgagcagatgccttggacccagttcaagtcgaaaataaactcgagatagcggcgaaggagatgttggccgaacatatcgatctggggctgcccttaggggtagaggatagcaagcttttgtgacaatgtcagtagcctatcctttttggcttatccattgcattggatttactgagaaatcaaggcgtttgacggtttgttttgctcttagattagggctgtatattattttgtacttagacataatgtacttatatcgctgaggtctaccatctttcctctgctcctctccacaaatgattttccttttccttctctctctttcttgctagctcagctcacttgatggagtttttgccttttcgccttctctagaaactttttaacactcggcaattgtcgcaccaactgtcctaccaaagtcttgaaattgactctgatatatctcctgcttgctattgattatctccatgcagaagctggtattatccacgccggtatgatatttctagacccattttcacttcttattcgtcctcctaacgcgttccctctagacatacaagaaaaaaacattatgctcgggattgaagatccttcaatcttagctgatttcgaagaggcggagaaatccaatcctagtccccgggagatcattgaagatcgagtgatttatttatctcacaagctcaagaaaacaaaccagcatgaccgacctgttttatgcgactttagccaggctcctttggatcagcccgttactcaggtgatataaaaccatatatataccaggcccccgaagttttactacgaatgtcttgggatcaaagggttgatatttggaatatcggggttgtagtaaggagggcatattttggtgtacttaccaatcctctaactgtcaacaatctaattacctcaggtctaggacttttccaaaaaggacatctattttacgctcgagattcacagaagcaagattcggacgctaatcatatcgctgagatgattgcgcttcttggaccaccgccaagagagatgatacagaacagtgactatgctacagacttctttgatattgaaggtacgtcactagaataatacaggcctctagggctcccggtcctgactgaagatcaaggcagttggaagggcaccgttccaatttcccttaagaactttggagcaccttgagggaaatctagaaggtgaacagcagcaactctttcttaaattcatgcgcaagatgcttcggtggcgactagaggaaagatgttccgcaagagatttattgtcagatcagtggctaaggtcgctataattagtcttaatagccccgttcgttgtatatttgaccggaacaggagtactttgataggttttctaagtcttcagcctcaccaataactggtatactaaaaatgtaatttctcttgtgaaaccgtagtccaaaaacctctaacaagagtgtattttgaaccaaaaagtacaataacaggaaaaacgactcatatctattttttgcccttgcccttcttcttctttgcgcttgccggagaagcaggcgtactcgaggtttccgcctccacaagaacagcatcgtcatcactgccctgaatagaggcaccggcggcaggggccgtagatgcggcctcagaggacttggttgtgatgttggtagtcttagcctcgtcagtagatgctactgagccctcattcaactccttcatgaatccctcttggatactcgtcttcttcttgatccaccactggcgctcctcttccaattttttctgttgatcgtccatgcgcttgcggtaaatatcgttattcatcatttcgttggcggactggaagatagtctggccccagccggggacataggcgtttgcctgtttgattttgtttagtaaagcacaaaacatatacaaccatttgttcgccgagaagaaaaaatgtttcttggcgacagagaacggagtttgcttatcatacctctgaaaccacatccttgacctcatcttccatctccttctccgcgcgctggaatcgctgccagagatcatcgccgacactaccacgttggacgagcgttgtgagagcttgcttctgggtgcgcagtgccataatgcgacggatgtcttcagctgcgcgacggagaagagaagccttgaagatagagtcagggatagcgggggccttcttctcttttgtggaagttgttgagggttcaaggtggaggagagagaagtagatatcacgctggaggtgggcagggaaccatggctctagagatgctgccttgtctataaattattcacaaatcatatattagccttggggacaattggacacgtcggcgcacgagatggtcggagaggctgagaggttgaggctttctaggggtatttcacatacgggacttgcgcttgcggtagagggaggagaatgtggcaagcgatcccaagagaatgcctaggtaggcgactgggacggcgagactgagccagtccacgtcgaacattgcgacgatgtggtttttcgggcaggggtatatggagagatcggaggtccgggaaagaaaatgaaataaagatggtcaagctgtcattcccaagtgtgaaggtgaaatcaagaaaagaaagggccttgaagtgcaaatgtggtggtcaacaagctcgaaaggccagggtgtttagtgggtcacgtcacatgttcactccttcgaacctacttccatgatagttataactagttcgggctgattatagatgtagatgtacaacttactacatatgtggctagagtggttcaggctgcgtttttttactatagcgatactataataaatgacactcataacgaaagattcgtgccaggagagacttgtgatattaaattctatgtaggcttccgcaaagcccaactttgggcctggatgccgggcctaaagtctaacccccggcctatcgtaggcctattaggcccccattaggcccctacgaaagcctattcttatcttaaatgttatacttgtgtagtatctataaagtctgggaacaatgccacccggtcatactttcaaatgaactagaaagaggtcagaaacagtttaaaaaaaaacatgaagagggcgtttcgtgggctgggcgcaaaaagagtatagatatactagttatgttacaagcacggagttacataatacaccccagtaatgatatttgaactccaattccatacaaatagacgaaatagtagacagacatcacggaactggtgtgggagcgattctgacctcaacggcgccgtcatctggcagaagtaggtcgtcccctgccgctggttccctccggtcaacataccgaagaccattccatccactcttgctatccaagcaccatagtctccggcttctgcgaaatgttgtgggttcctaactcgggacattccgagccaattgatgacaaaatggtacccatgtccctgtttacttttgagccgatcaagctcgacagattccaagctgtaaagcacagaagatgttagaccagtagatcgcccggacttggaaagtcccaacccgtcgtgggtatcgaggattaaaccactatgatatggacgatcgatcatgtcgctgctattgttattgctgtaccggaacccctaaagctcatgaattagcctgagaaaagacatagataacatcgaacttgatatgttgccagagacctcatcagcatgcatttttcggtggattctattgctcgacatttcaatcagagcccagtcagcggccactcgacgcttgtcctcattgagtcggatgcgatacataccacttccggcgacgacatgtcctaggtagtatgctccattctggcattttcgcatatgaatcccggttcttttcaaggtgttaaatatcccgcagcgtagcctcgtacgcacgcctggcagaatccggtaaccagcaaccttcccctttgtccatctcggccttcgaggtatagaaagaagcatctttcacatcttcaatggacgaatttagcgcttttatcatggtcctgagatctcgagatgctgggtggtcgattcggagaatgcgcttggcgatatcaaggaaaaaattgttgttgtgcataccagtccaagccaacccaaaggcctccagcgcggagtgttgactttagaacccccattttatcgatgataacgggaccattgaacggtgaaaaggtggatgattttgagcagaagtccattgaatgagcgcttacttgcgagaaggaagatatggttgcaactgacgacatgatgaaaatgaccacgatatcagtcgagggaggagggttgggaagcggaaggttccgatccgaaattagcataaataaagtataactagttcgaggagcggtcttatctataacgatctaagtgtcctaccgtatctgtactttctacttataaagagaatcaccatttatatggtttacagaaagtcctcgtactagacgagtagaacccgtaggtagtttttcttttcctttctcctgggtatttattatctaatgactgctctaaaaactgttctaaaaatggtatagatactaaagagcgattccttctataactagaaagtacggacagagtaggtacgatagaggtataaatacctcctagattgtgaggtactagaagaaagagtacatttaactaataacaaagataaagaaaaaaagaagaagtaagttgcaaagtgggaagcagctactagttaatatagctgactactttataaacgttgcaaactttgtatcgttgtctgaagtacaacatttacaacagtgtacctattattccttcaaatatatatctcgttgtactccggaatatgaagtagggatttgggatatatcaaatcaaggctagctatgcaaagcgccccccccttccctattactggcttattggctcacttctagcctacaacacaacaagttggatgatttcactcaagtggtagaaagttaccgcttggagatcttttctgtggaaaaacgtgctccgtagtttccgcctgtaacgctgttggcgccattgatcccaagtccaacggcgtttggaaagccaacaatggatttcaacacttgtcaccgcattctttcctacgcatttgagtccataagaaaacaaccggcacgtggcatgtacacgaggttatgcttcgcttcgctccggccattctcaatacgacctataagagctacaattacgaagagaaaccacgttttgaaccattattttcatagtctacatgtttcccatgtgaaataacacgctgaaactaatttttgcgtaaacaatgagagagattgggcaattcacacatttgctccccatccaccacaaaggaaaaaaaaaaaaaaagaaaaaccatcgccagatcagaggggaatatgaaccgagtcaacatattgacaaagtaagaaaaaggacaaaaaagaaaagggtgaaagtatggagtctctatcagacatcactaaaactcaggttggccaagatatccttggtctgttggctgataggtccgatctcctgcatcgcctgcatgtcttccaggactgtattgtatgttttgccgagaccatcggcgacgcgagtacggttccattctccacgcatatgccacacatagtccattagattggtgttgatttgctccagctgctccactgagaatccgctagttgacagggttagctgcgtgtgcagacgctcaacaacttcaagatcaagaacgaatggttcatggggttcttcgttcaggatcaattgcaagctagccgaagcattggttgctggcatgttggatgcatcgaacagcgggggttgcggtttcgactgcgactggcttccattcaacccgctattctcttgggtatctgcattgctaagcagcgagtcccgggggtggggagaaggctggctgctgtcattttgctgggtgtcgggcagatggtcttcctgtgacacgcgatcggggtatggagtaagatcggggtattcggttcttgagacatgagggctctgagtgtggtagttttgattcgacagatgctcagaggatttcttatcagaagtcgtctgggtggtggatgcttcattagtgtaatcagctggctgggatccgggggccattggagtcatggggcctcgctgagagaagctggaaagaccagattctcgacggatctgctgagaaggcgcagtgtgggaataagggggcttgggctgtgctgatggcccaaacgagcttccctgggtatccttgctacccgagtggtcatcagaattggacatgaaaatgtcgccgtctccatctccatgggtaccattgctcgcgccgacagcatgggaaccaaactcgttgagatccgaaccatcgccgtgatgacttccatttgcgaaactcttggacgggggtgcgggcgtaacagggcgcgaagtcgctttcccaacatcctcattgtccccgacgggttgaattgggccagtcgataggctggattcagtcgtgccgtgcgacacaataataggctcaggaatggggggaggggcattctccatctgagcacgtttgccacgctccgcggcctccttttcacgagccatctcacgcaggtagacctgctcacattctgccataagagctggttcggctaccataacactagcgatatcaacttcgacattagtcaaaagttcacttgaccgcaagatgcgttccgggtcaccagtctgtcgagcatctttgaccattcgcttgatatccgccacaaagtcgacggcgcgtttgtagtatccgtttgcaaggcgtttttcaattgtcacaatctctaggttgtagtagaacttcccagtggcagtttcacggagacccaacacaccatgcttgtcatatgccttctcataaggccgaaaggtatcttgctgatccggtggaagatcactggtaacaatgttgggattttcttcctcccacaagtatcggatttgggattcatcgatcacgcccgacctaaaacgcttgtacctcttgacttgatccataataggctgaattcgagttttcagaagattcaaggatatgtaatctttcttcctctgagccttgatctcctccttggtgagttctgcctcgggcttgggaggcggaggtggcgcgatttccaatttctccagctgacgaagtttgcggttttctggattcgggaagcccttcggaggtgtcttgacgaattcaatgatttttccaaagaattcacgacgcgcatcatgagttggagcagatagatcatacaggttcttctttgaaaacccgaacatgctctttattagactatcatccacttcctcttcttgtgattcaagaatgccaagcaaaagaactgggtcagaaggcggcaccgaccgcaaaagactcatgaaagtagaaatcacagtaggtccgacagtctggaaccacagttgaatattgggaatgtaaatcacactcggcttgtgtcgcttgacctccgtgaatagctggatgacagctgcctcgggagagcgggttgagtcactcagcaaggttgggagatcgaaggcctgtacatgcaggccctcaaacacatgcagcagcgcggcggcgaggtattgctggcccattccgtgagggcctcgaaggaggagtcggggtcggaagacacgcgagcgatcaaactcctgaagaaggagctcgcgggtgaagcctgcaccatcatcaggctcctcatattgagcctcctcgagagcagtaagcttctttcgctgtggaagtatctcggagagcaaagacttgatttcaaataatggacgacgaagcaggggttcaatgcttggggggagggcactcgcaccagatgaggtagaccgctctgaagagggcaccatcttcttgattgctagcatgaaatctttgggggcgacatcgattgttttcggatcaatcacgagctttttgtctgatttgtagatttgagggtatcttctttgtacagcattgattgcagcctcagtgcaaagggctcgtaagtcagccccgccataacccttggtcatatccgccagatcatctttgatattgcttggaaggggaggatcccattccttggtgtgaatgtcgagaatagcacggcgtgcttcgagattaggcagcgaaaaataaaattcacggtcaaaacgaccagggcggcgaagagcaggatcaacagagtcaggtcgattggtggcaccgatgacaaccacctgaccacgaccatccatgccatccatcaatgcaagtaaggtcgagacaatcgaggcatggatttgttcttgtttgctcgatctcacgggagccaaacctaatatagaatattagctattgtcaactatgctcagaatggcctctcttaccgtcaatctcatcaaagaagatgatactaggctggttcttgcgagcttcttcgaaaagaagccgaagttgtcgctcggcctcaccgacccatttgcttaatgcatccgcaccctttctcatgtaaaaagttaccttgcgtccttctgagctgacactgttggctagagcccgagccatgagcgtctttccggtaccaggaggaccgtggaatagaacaccgcgaggaggggtaattttgaaacgctggaatatttccgggtacagcagcggcaaagaaaccatttctttcaactggtcaatgtgcccttgcaaaccacccacatggtcaaagttgacattcatgtcaacccccaggggatccgcgtcagctaaagcttgcttgttattgaacttgccaaggtttgcaggcgtgccggatgaggtctgagcaggatcagccgactggttgtgggtggctgcaactccaacaccaggagcacgattcggctgtggggcaccttcgtcatcactgctatcgctgtctgcgcctccaactgcagtagggccaccaggaacaccgagaatcgctgaattaccaccgccaccgaatgggcctaatgtggagaacaaagtacgctgccagcctccacctccacgaccacgccgggatggagaccctgtcacttcatggtcagtgtcttcattaggttgaaacatttcaggtcgaatgatgcgataatcaacgtcctttcggttgcgacgcggtttctcatacacgaccgcttgcttcgcacggcgacgggcacggccagtaaggtcttccaattcttcggcgagttcctctgcctcctctgagggcgcacgggttcgagaaggccgttggcgtaggccaggacgccgactggcagagctatcctccgcttcctcgcgagcttgaatttctttacgaggagaggcacgcgattcagggtccgagtcttcctcttcatcattggatggctcctcctctggctcgaaatcactttcttcatttttgcttttccgctgtgagcttcgagacggctgcttacggctggaccgacgtaggtgcgattcttcatttgtcgccgcgccttgcgcggtattctcctcaagagattgctcgtggtggagcctgcctcgttgccgagttgttggaggttcatcagtctgctcggaatgatcattcttcgaatcgccattttctgattcaggaacaacatcttcatccggcattactttctcaattgggtcgtgatctccatcattcagtggcaatgtatcaccttcagcgccgccttgaggcacgtcactttccagtacctccatttgtgagccctgaatagttgtttcattgatgatttcctcagtgtcctcatcaccttcagcatcctcatctccttcggcgtcttcatcttcatcgtcttcatcaatgatcgtgcgcttggccatgcggccaactctggaaacacggcgagttggggatgggttttcggcttctggagtatgtgtacctcgctcaacagtgtgcatatgacgaccagagttggtaagggcgtagatatcctctgaggcgtcacgagtacggcgggttacacgtttagtgaaggccaagtaattgggcgggagtttcaacttgatgacggtgctcttgcgtggaggagaaggagtaggagctcgtgtctcactctcgccgtcatcattgagcaggtcttctcccgaatcaggttcctcatagcgcgggcgacggctctgggtggttcgtcgacgggccgttcctctgacattgcgttcgacttcttcctccgattcttcttccacctcgtcgaagtcaaaatcctcggacagttcttcctcgtccgaggtgagaccgtcgtctgagtcgcgccgtctcttttttgtggccggccgcgactttttcttggggctggccttcgacttccggccggtcgaacggggataacgagcatgatcactgtagtcctcgtcatcggagtcggactttatggcgacctcgtccagggtacgctttgcgccacgagccatggcgtagttttggtgattaggggatcactttgaaacacaacgtcagcatgcaacgctccaatttgggaagtacgatgaaaacacagtcaagagggtcaaatgcctagctgacaaggaagacgcaaagatgaaaaggcggatcgtcgacgttgcgcgatgcgggcagagggacaacacttacgaatggttcagttgtcgccagcaacagccagaccactcgatcaaagggaaagaatattcctgtcacagcagtaaccgtggcactttcttcccgacaattgctgatcaatatgttagcggagacggcacggtggtggagcgcaattggggcagagatggaagggtctcacggactcgggaacgcgtgggaaaacaaacgtgtcggaaagctgtcagccaccaggacaaatgcgcagtacacagaaataattgcagcaagtagaagaaagtagaagacgatgcgagatcgagggacgaagacttcagggaagaagggcggaaaggactcgcgctcattggggctgactgcctgaattcatcagccacttatcgtggcgcaccgattagtcaacaaagtgcacgtgccaccctctctcaatggggggaattgcttcaatagccattgtcacccttcagccgatgaatcaagcccccatgaatcgagctattgtagagctccattctcctcctgaatggactaaatggattctattaaccattttgatgccccaatacggcacattcaggattgatgaaggtgtgggggaatgacatgatacaatgatggcaggaggtgtcagagggcaatttggaacatgaaggagacgagaatagggccctttgttttttccttttcgttgtctttttctctgcgacgctttcgaccggacctgatatcatgtgccgctgactcagcagtggctcgtgcccctgcactagaagatcgacgtgcatcgacactcatcgacccattcaccaagccaattgagaatctattagtttctttctcgtgatatttgtttttcattgatatacctattgatgttattcatgtcgcactacagcgccgataaaagccctggagacttcaatatctaatcttaacaagtgacgagaccacttacattgccatcgcgacatcacagggaaatctttttatctggagggatagtaatttctaggatagcaatggatttagttgaccatgtgtgtatatctcaacagttgaatctccaaataagcaatagtgtcaaaagcatcacttcacgagtagccatctacttccttccgataatttccttccatttagccagctttgacgccaagtcgacctcctcaatcctctcctagactttccggtcccttataatgtaagcacgcgacattgagagaagataagcactatttgaatacttgagggccgctctcagagcatctctgatattcttcttctcttgtgcagtgagctcacatcctcggaagctcgagcagcatgcacacccagtagtgcagtgaccggctcccatacttttttcaggagtagactcgcgtttctcgcagcatccgcattcacgcccgcagcaaccacctctcccagcacaatccttgatcagttcattttgcatataccatttcggattctttcttaatgattcataggcaagtttcatagggccaccgggaatgctgctttgccacttgtgaagctcacactcctgataccagtattccttctggagcacctcttgcgttttatccagtttctcgagctgtacttcgtcttcaccggtacttttgcagtttttggagtgcccgaaccttttcttgcagcgcttccttctgctgagcaagttcacggacatggtaatcagcaatgatgagctgtacgaagagatcgagcccacaacgagcttttttatagccttttctatacagaaatttgtactctgtccatccaattcgtttgcgttcaatccgccaagtctctgttctgaagaccatattggaggacacaatttggagataaattagatatgaagggagttagctttcaaggcaaagggttaactctacattacatcattaggtagtcgagcgccgacacccaaaaagtcacctctatgtgatagtcgacaaatgctagaaaaaactgaactttgatagagaaaattggtcatgaatacatatactggaagagtcacccctgggtaatcaaagtactagccatttcaaccccatatatagcaaatccacgctagttaaatatatgtgctgcagtacttaccttttctgtcgattatttttggattgtatacccaacttaatcacgagaggaagagagacgaataaattgacacctgaggaagcaacgccaagaccgatatacccgaaataggatgcgaacttcaacatcaccctagctcgtcttctcggatatcaacaacgagaaagaaggcaacggcttattaagatcacaacatgttttcgcaaccagctcgtcggttggcaccggctgtgatgtctttccaatccgctcgagctcccatgagccgacgcaccttcacctccacacaagccacattcaactcatctcagaaaccaagtgcatacaaggaaggggtgtgtacatatttttcttccagaccgcagtatttaattgcaatcttctaactttgtgtgtctagatgaataaatatcgagcctttgctggtcccttcgccaagatcttcttggggggcgtgttcgtctaccaggtcctttattggacttggttaaaattggaaatggatgagattaaggtggcaaaaaatggtgagaacagcacaaattaatacattccattaccctatcttgcatgtcgctaacccttcctgcagaaaaagtggcggtgctagagaaagaagcccgggagatcactagcacccagaaatgaacacaatcttgagaagaatctcgagaaaacctgtaccatattatgcttcattgatgcctagcactatattatattgtggctgtgaataatgtcatggcacttccagacttggagatacattgtgatgatcccgatcaactaaacattgcagaatatccttattatattacggaaccaggattccaataactattcaaaaaccctagtatgtcatgccgcagcatatttgcgcttccgctcgcccgtcgttgtagcttttagactgtgatcaagcgtctgtaccacagcatccttggtctgatccatctcgtttccctcgagggacgaagacgggaaccgccagtcctggcccctctctcctttcttgaaatgctcaatatcaatatgattaaacctctcatccaaggcctcggggccatgggtctttagtgtgactctgtggttacagaatccacaccaaaaatctgactggccggccagatcgagccggtgattgccagcccaagctgcgacgtgatattcatgaattccatgctggcgcaggtggtgggtatatgtgtcgggtcgatagaacagccgctcgcacgaggcgcctgtttgcacatcggtttccgtgcagaaccaactgggcacaccgagatgctgggagctctcgtggcgcttccagtcggccttgctgccgaatgacttggcacagtgggggaatgtacagctgtagggtcgatcgtggcgcttctggtgctttctaatgatacccgtggttaatacactaataagaataagggtcaagggtgacttacttcatttcacagcgaagccgggtctgctttgggcacgcgtcacattggaaccacccacgtttttcgctatcaggaccttgggcggtggcttcgttttcgtcagataaccgttccaatgccaccgaaagcaacttctgtagcatttgccgctggggttgggagagctgagcagcgtcggtctcaagatcgattccctcatccatattctgacttgatctccgcccgcggctgtttatcatctttgtcatggcgttgattaagttatcagcggcgtctgcaaccgatccatcaggccttgcgatggcacgttcagtggacggatcttgactcgtttttgacagacccatggaaccaaaagcaggcgattgagaaggagtcgagtctgcgagagacggcgtaccatactgagggggtcttggtgtggcagcaccaaatgtgaagatatcagtcctttgttgagacatggaatcatattccggctcgagatcggttgactggacagacgcctcatcttcttccgcttctaataccgactcgtcccttgagctacgctcgtcgaagttctgttctggttggtggaggatgactgtctcgtaccaatccatggacctgttcattaattagtgcatggaacattagatgtctcacttgaaacccgctttttaaggagtgcctccccatcctcttctcgatgcattcggttcaagtgttgcttgaagttatccagacgcggccacctcttgttcgggcgcgggcagtttgtcccaaaacacatgtacatcatcttgggcccacgctcgggctccttattgtgaacgcattttttatgacgggccagatcattaatggtgccgaagccgtccttccgcgggcaatttggaacgtcacatttgaagagtttcttgtggcgagcctcgtgtttcctgtggaagttagtcccctgccatcactattctcaaatcgcggctagaacgatataccttttgtccgaaggacatttcccaacccacttgcacgatggatgatcgcatcgcatcgaggtatccaccaactgcgacggcgagcccataaactccgatgtgtacgatgacccagacacagatccatacttggaatgaccaaacaaaggccccgactccgtaggcatattctctgtcatctcgacgtgcgggctcgagtccacgctgtacgaagaagcaacaacagattgcgttgcacagctggtcccaccgtacccggaatcagcggaatgatagctatctatatactggctcccgttctcagatggctcgctatagtgatgttgcgagaggcagcagtcctggtcgggcatctgaacagacatgttcaagtgcgagatggatgaggcagccgggacaccggtggccagtagcggattccaggcatcttggtcgcctatcagacgggagtgagcgtactgggagtagtataggtcactggggtgtgaaggccactggcttaagagtgggtggttaactgttggatcgagcgatccgagttggaggtctagtagtgggtttgcggcatcgaaggggatattcgagggtctaaaatcggacagatcatgtccttcgtgtccaaccatgatgccttgaaggatgtctgtggagtcattccagtccagctgtgtctgttagggtggagttagattatgattcgtgtggagagtcgtatagagttaacagggcacgaacctccatgactatctaataatgtctttaatataaagaagatgataaatttcgtgaagtcgagagagaataagcacccagtcaaatgggaggggcacagtattaaaaggctcgcgatgcatgcaaatgccaaaaccctacacgcgagagacacgcaagctccacacgacccgagccggttgacttcaccacgcgatagccgattcaagggttggaatgtgttaagcgaacatgattaggaatatgctcaataaaatatacacaaaaaaggaagaaaaagaagaaaaaagcaaaacagaaacccgggaggtaaaagctaagacaaagttcaccctcgcgtgttgccagcgtggaatgcaacatgtcatcccttgattacacagcccgcccctttacccgggtaaatattaatttgtaggttattccataaactgtggtgatattttccacatcaaaaatatgaggctgatagttaaaatccaataccggactaagatcacctcaaccctggtctcccgaggttgtccggttcacgatcggctgccgaacactctcacctcccagggttgattcagcccgcttctaacataatcgcagaacatccatagtttacacgtatcacacacccacgcacacagaaaatgtcgttagtccccctgcacgaggcatgcaagacaactccagccccccatgaagatctcacgataagtctccaaaggggaggaggctgctgtagggaagcaaggaccggattgggctgtgacaggacagacgatcaacaaggctgatcgacgccgatgctcgcttgccatgttcgtgcaagggataaataagataaatgcgcacgtttatacgcgatacatgtgtattttcgcatccaggagtcaaggagattaactctgaaacgagaattggagcactatctgaatttagcctgatctttactccgtgctccgtgctcggtactaaatctcggattaccattgatgatctccagaggtactttatgttcttatgaaccatggaaccatgccccaagtgggaacagcctagtacaaaagaggaaaagccaaaacataaatctgatctctcatatgccatgcgctgtttggtctgaaacgaaattcctgagcgcccgaaatatgtacagagatattgcgagcacgtgttaaaggaaagaaagcatgttagttaaatcatcatacatagtcatcattccagaaatacatgagatcgggaccagctctcccgatgctcgggaaaaaggcacaaaaattccttctagtaatcactaacacggtgaagatgacgtagaacaattgacagcaaaacggagagggggaataagaatacaaaaagaagggggcattgtatctataatcacattcgagagggacatcccgaagagtacgtcgcaggactgtaggggctgttggactccatgggttggtaagttgagtaagtaccatcggtggggtacatagagggataagggagatactgggttagaggatacgagtgctgcggcatgagatccgcccccggagatctcgatctcgggacggcgttataaggcggtgggtacgtcactgagttctgatgtaggggataggcctgggcctgagcgggacggagtgtggtttggtcaaattggcccgtcgtgtgcgtgtagcctgggaactgatcaggggtatgagagtctatcatggactccggctccatggaaagttcgcccccggagatggtgggataatttgccagaggtacggcgttgattgaaaacccaggattagccggtgtgctagtgtttcggatcgcgtactgcggctgcagataggtggaggctgtttcgggtagttcgtgtccagggtgatatggcgcggccgatgattcccgaatctgccccactttgctggggttggtggcaagggttgaagcgttgctcggcttcgctaatcgcaaaacgggcaaggcgagttgctccaggtgtttgccaaggtggactgacaactttctccactcgctacacacattcccgcagaagcggcatggctcttcctgcggggcttgcgtggtttcatgccgacacttttcgaccatttgccataatcggtcaagctcctgctcttttcgactatttggcacactctcggcatccacggtgctagaggctttctccgtccttttgatcctgggctctggcattttgtgttcccggaccaaatgctgaacgaaattgtccttacggtaacatttgtggttgcactcaggcaatacacatgtccaccattccaggtgccggtgcttctcgttctcatggcgaacccagtctgctttacgcttgaatgccttgggctcggtacagtgggggaatgtgcaaataaatggctgcacatcttcgtgaacgtgtttagaccagtcggatggtttttggaaggttttcacttcgaagcaaatggggcactcaaaccgggcaggaagacgactgactggtggaaggggcacgccaggagggaaatgtgtcgcagccgccgtcccatcacctggagaatactgttgctcgtactcataactgaaatttgtcacttgggactggatctgtcctgcctccggatcgttgggggcctcgagatcctgcaacaaagtgggtttccctgcctgaatagtacaaagggtgcctgatttgcacgtgtggttggcagctgcaatggaatgcttctgctgcaaatcaaccaagatcttgtatcggcggacttgctcatgtgctaagcggtgaatcaaagccggctcaagccttggattcaactgcatgatctgcgatttgaacccttcgattgtcggcactgggagactttggacagcgggaaaatccatagctacgcctttgttattgctggcgtgtgtatcattctcatcagcacctccattttcagggcccagaaatgtacttttaggtatttggtaggcgtccgaactgacatggggtgatgtgatgcttggaactggtggtccaccatgagctgtcatgagatttattagcccagggctacttggtcgggggacctcgctcctgcttcgacctcgacccttgaattggatatttaaagaacctctctccgtattcggtgagggtgcaggcgacactgcttgcccgacagcggccatttggctggtcattgaaagaagtgcgttgctcaaacttggcgctcgcgaatgacgacggtgcaagaacccattccgtggtgaataactcgtttttgccggcaagtcctctgtatcacgctgcggaaccccggggtagctattcgattgaccgatagaaagttcagatgcttggcgcttcagaatcgatgatgcctgcagaaattgacgcttcaacagactggtgcgtttcttgggtagttcggtaatggaaaagttttcgagagatgcaccaacattgataatgctattgttatcaattgttgcttcgagcgatgcagtttcgaggtcccgcacacgtctgttaaaagctatcatagcgtctgtggagctatctggctgcatcgcttgtaatctgggtgtcaaatcgcgagggggatcgtgccaggggtaaatatgaatgctttcgtcatctttagtcggcgagaaagatgaatagacctcgggggtgctgcgatcatatctaccagattcatcaacctcggctgagggctcctcggagtagatgtcaacgcttgcttcatcttcgctgaggtcgtcgctgctttcatgaactaataccccgggcccaggaaatgatgtgtcttcggtgcgacatttgaggttgaaataatcttcttgtttcaacggatgatcaccggtactcctcgctcgaagtctcctggaaacaaggtgtgggcgtggacgcggtgaactaggtgagtccccaccggcgtcgctgttggctgcgctcacagagacagaccaatgagaaatatccacatttttctcgctcctttctcgctgaatatagacgtcattgggacttggcacgaattcatccccacgggacgttgggtcaatgccagctagatgcgttgatgggtttagaatccatccgccattctcagatcgcttcacgggaacagaaaataccgagtgacgatcgctatcatcttcgtcttctaggtcgcttgaattagcagatagatgtgcaaaggactggctgagatgtctttggggtgatgtgctgcgttcctcgggcgaatcccctcgggtgaaggttgtaatcttaacgatggggcttcttcccctggttgcacccgaagcctgctcagtggtcaactcattggtcaagacaccgagtctcggcggctcagcacctgcgttaaagacaccgaggccagactggcacgaggtggggattgattgccgtgccctagaattgccaggaggctctggacccgccagcgtgggtgatggattcggattctggttgtggtccaatcccgtccactgaaagctcggcgccatggaagaaccccataccgcatcgacaggcatattttcctccccaatcctgtacgatggcaggttttcattttgccatatcgaaccactagccagttcgatatccttcggttccacgaatacacttgtatcagaaataggggaggtgcaagtgcttgggtccgtataatcatttgctctcgggtccaaatagccctgggttgtggagtcgatcggagtttcctcatgagggggtcccgcacggtatccaggactcccccgcgttggcgttagtcgaatggcactggcctgaaagaagatttcctcgggatcagatggggctgataggtaaggatccggagcatatcgatcttgggttgcatctgctggcgattgcccctgggcgctgagtggggaggcgtgcgacatattgaaatgaaatggcggtcaattagccaaagattgaccgcgagaacgggcatcaaattaagccgaattagaaagcatcgagtagatatcgtcgtatagattataaaagcagatttgcgattatattggagttgtgtgtggtgtttggtgtttggtgtgatgatctggcgttctggtgtggtttgacgcccccaatatataagggaatgaagggacagacgaggccgcaaatagttcaggttgaagttgaagttgaaaatcagagattaaagagtaaatgaaagaggaagataaaaaaagaaaaagcagaagctatgggggccgaagattagtcggagatgaggggaacagctgaacaagcgccgggcgcatccctccacttctgattcaatacaagactaagaagaataacaccaataagatcaactatcaaatgtcgacctggtaatgccggactgtcagccttgttcaaagaagaaacaggaatcaaaatgctccgctttttcacggagcctcactagggaacgaccctgtggctgtgcaagttgcattctctctttacatcattacctatggagtagtattatatgaagcattatatgaactatcgatattgggtacttcgtatgcttgtatataggcgcctcagccacagcattatcctgctctggccgtgtccatagggctaaatttattggaacacacggctgaatacaatgaaccttttaccgttggtcagaaattgctcaagatgaaaccggtttatgcagtattcacattcccaggttctatctatatatctgaccaatgtcaatagtaatgatggtcccttctctacgcgcccactaatgtaattatagactacagcgcttatgagatttccataacaaacctgtcaagatagaatttgaatcctacctagttgcaagcaaacccgcaaggatcttcaatcttcatattcctgctaagatttcgctgaatttgtagggttgatgccttgatatgcaggctatatgcggtgaagaggtagtccggctaactttggcagaataacccaaccggcagaataagtaaactagaaaattgatgtaactacagtgtagtgatggaatgatagagggagagagttgtctattcctaaaggggcagaatgcccaactatctagttgtgggggttggtgcctgccgcaccgagctgatggtcaggtgaccacgatgtccaacaagaatgaaccatcattatcttccccagagcttctacagtcacactttacatagcattaaaagttagaatcagtcgttttgctctaaaacggctatcgggcggccgcagaccatccagatccctcgtaggtatactgttgtaaatgttgtactccagacaatgatgaaaggtttgcaacgtttgtaaagtagtcagctatatcaactagcagctgcttcatactttacaatttgcttcttccttttttcttaatcttcgatattggttgaatatattatttcttctggcacctcacaatctaggaggtatatatacctctattgtacctaccctatccgtactttctagttatagaaggaatcgctctttattatctataccgtttttggaataatttttggaacaatttttgagtagttattagagcagttattagataataagtaccggggagaaaggaaaaggaaaactacttacgggttctgctcgcctgctataaggactttctgtaaaccatataaatggtgattccctttataagtagcaagtgcagatgcggtaggacactcagatcgttatatataagaccgctgctcgaactggttatactttattcatgttaatttcggatcggaaccttccgcttcctaaccctatttctatctagcttgccctcgactgatatcgtggtcattttcatcatattgtcagttgcaaccatatcttccttctcgcaagtgagcgctcattcaatgggctcctgctcaacatcatccaccttttctccgttcgatggtcctattatcatcgataaaatggggatggcaatatcactagaggaattctgaatcctccttctatagcgatttgcctctctccatttgatgcacctcagaccccacaattcgctgtccacgcggttgagtacctctccaccgacctacaccttcatcaagtacttctcctacgacccacctttcaacctgtttcccacaaccagcttggcggagcctaagctcttgtagctcgtcctaattattaccggcaaatctaatttcgcctcgtggttcacatcattacactcccgacaacgtcctttgcgacgccaatttgactgccaaatccggcaacgctcccactgagccaaggcatttttgtatctagaatatgaggaaccgtgggattgatgccgaaatgaccgctactgagaccgaaaacggttgcctttccacttgtatgtttagacgtccagccgcttcctaaccgcccactgccctacaataccactattctgcatcctaaaggggctttatgagaaggaccagtcagttatagacacattctttattcagcgacacacactccccgctagctacttcgggtatagtatccacctccggctgtccaggtttgatgcgttattcgcttttaatctacgtaacaacgatctccttttgattttaaaggcatcattttcgggactaatcgtgccaagctattgacaatcgtgccaaggtgtcagcaacttggcattcgaagtctaagacatccgttgtatgttgtagtccatactccgtaccgttgacgccaagatcattcccgagataagataggcgttcgataacgagcctaagccctagagggttgtaagatccggggtcaacacgagaacaagacgtaattggatggctgaaattctatggaacacatgctctcggatccttatcttagcttagatcgaatcaagtccccttcttatcatgaataattcatccgacagtcacagattcccatgaactataggcgactactatagattcaaagctccccgttgaaacaatagtcttggctgctgtcatagaatagataagatgcccgaaaatctttgttttagctattatgagctatgtagatgtccactctgctagagaatatatatgtactgtggacccccgagcagaggagttaggattgcgatcccattctagttctcatcatggccgactctgtaagtctagtatgatggaaatgacacttgcacacagctgacacagtcatataatatagccagtctacaatgcatctaccccaacaggcggagatccactcaaggtcgatgtaaatgctcaatatgcaggcgtcgagtggaactatacctacatcatcctctgctcgttcattgtttggttgatcatccccgggattggtcttctctacagtggtcttgcacggagaaaatcagcactggcattactcttccagtcgttcatgattgcggccgtgtacgttaaggtcttcttcaaaatccacgcgtacatcgtactgacaccatatatcccgccaggataacgttccaatggatgttctggggttactcgttagcctatgcccgggatgcaagtcccttcattggaacccttaagaacttcggtctgagaggtgtgatggtagcaccatcgcctggctcggcggatctcccggagattgtgttctgcttttatcagcttctattctgcgcatgcacggtaagcaacacataaaacagaatgtcgcgagactggatctaatggaatgctgcggtaggtcatgatcgttgttggcggagctttcgaacgaggcaacatgatcccctcgctgatcttcggcttctgctgggcaaccgtcgtctactgtcccctagcctgttggacctggaacagcaacgggtggctgtataacctcccatcacttgatttcgccggcggcggcccggttcacatcgcatctggctggtcagcattggcttatgcctttgttttggggaagcgcaaggatatcgacaagccttcacatgcgaaaccccacaacaccaccttagtcttcttaggcacgtccttgatctggtttggatggttcgggttcaacgtatgtcacacctgtgccttttctaaactcaagtctgacagcagagatttcttagggcggctcgactctaaatgctagcatgcgggcaatgctagcggtatttaacaccaacactgcggcttgcacaggcgtactcggatgggtgctggttgactatattaagtatcgtgggaagttttcggtcgtgggggcatgcgaaggcgcaatcgcagggctagtaggcatcacgccagccgccggatttgtgtccgtgtggcttgctgccgtcatcgggttcctcacgagcatcgtctgcgcgctcctccaaaacatcaatgagtggttacacatagacgaggggatggatgtgttcaagctgcacggtatcggcggaatggtgggggcattccttaccggcatctttgcgtcgcaatctattgccgcgttggatggcgtgaccgaggccactggtggcattaacggcaatggagtgcaggttggaaaacaattggccgaggtgtgtgctatctcggcatattcttttgttgtctcctgtatcctgctttacattatcaatttcataccggggatgcagttgcgcgtgcatgaggaggtggaaatggttggcctggaccgcacgcagtttatcgatgagcagattggtgagcgggcgctgcttgacgatctatgcgggtcttcatcacctgcaagtgtgcttaatgggcagcttcctgtagtggttgggtctgagggaacgaaggaatgaccgggttagagtctcgtctcgtgacttcaaatcccagaattgtatgtcgaacatgtaacttgtctcagatattaacttcgatgtttctatttttattttttatttgccatctcgcttctatgtataatgttttagcgagagatgcccaagaagaaagcttgtgactttcagtgtgtgactgaatttgtttgtttatttgtttgttttgttttgttttgtttttttttttttttacgaggattctaccatacagtaacaggggaataggaaaagccttcgccaagacagacccttgttcattagagtgacgcaacgaatctccccatcggcttccaaggccggggaagggaggggctgacgtatactttcccctctccccggcattttagtgtcctgtagggtccttttcccaagctgcattccatgacgacgaggctgggatacatatccgcttacaatgtatcgactaccccgtacctacagagtactatagttaataaatagtgaagttgagatagtcaaggcccaagtggaactgtccctgtcaagattaaaacaacgtgattagtctgcatgccgcagtgagatgtgtacacatctgcaggagaaactaagtctgtagtacattcgagattgtacgttggagacattggatgttattcccatcaaatgattgaaaatctgcaggaaaaaaaaagaaaaaaaaaagattacccggtcacagaaacttaaattacccataaattaccccacttttcccaattcggaccaatctgtgcccattttgccactgaaaattccgagtccggcccgtcatgtttcgtaccgctccggagtcgtcgcgtccaggccgcttttggcactctccttatctttcttggccttccaaggttggctgtctctctcctcactctactcttcactctcaagtcttctttactttccgtcattcgtttaccccatattcttgcaacctaatttgacaaattgatcctctgcttcattttgagcagtcttgtcatgctctgcgaataatcaaaagtccaaatgggcaaatgtatgcagtcctaccctaactttcatgatgcggcaaattgacctttctattagggcgttatggtgtcgtcctagacgcaggatcgtctgtatgtcgactcatcccggagactcggagtcatgccactaatcaactgcacaggggactcgcgtacacgtttaccgatggctacgaaattccgcggcacgaaagaacgctcatgtggaggacttgaaatcgctaccggaaatcaaaactaaagaagaatggacgaagaagattcacccaggtgagcgctgctcaagccaatacggattcgtcgacaacatactaacctatctgcgcaaaaggtgtttcttcattcgccaacacacccgaattggttggatcagaccatcttgctcaattattagaccacgccaaggggatcattcccgcggaagatgccaaggacactcccatattcctccttgccactgcaggtatgcgactgctaggaaatctcgagcgacaattgcttctggaccagatctgttcttatgctcgtgacaactcaaactttttacttccggactgtggggttcacatccaggtgattccgggcgtgaccgagggactatacggatggattgcgacaaactacctgatgggatcctttgatgccccggagaaacacgaccatggaaagggacacagcacctacggattcctcgatatgggtggcgcatcagcccaaattgcgttcgccccgaatgttacggagacagagaagcacgccgaggacctcaaattattgcgattgcgaaacattgatggatcagttcaagagcacaaggtttttgtcacttcgtggttagagttcggcgtgcatgaagcccggcgacgctatctggacgctttgcagatggcaattgggccaggtatcaaagaaatgcctgacccttgtcttcctagtggattgcgcaccacacttgatggcagggttgcatcggcgagcgagacagaaccttatctgctaggcacgggcagattcgacgaatgtctccgtcagacatacccattgttggataaggatgctccatgtgcggatgaaccgtgtctgctaaacggcatccacgttccagctatcgacttcgatgttaaccattttatcgggatcagcgaatactggcacaccactcacgagattttcgaaatgggatacaaggacaaagcatacgatttcaacacgtatcaagaacgggtccaaacgtattgctcacaagattgggactccattgagcatggccttggacagcaaaaatggggaaagaaggttgatcgccaaaaggcctacgaagtatgcttcaaggcatcatggatcataaatatgctacatgatggcattggagtgcctcgcgtgggcttggagaatacgactggctctttgcacaacggcaccaaagaagtcttggctcatggaaaagaaaagggctaccttgatgctttccaggcggtcaacaagatcgactcgaccgaagtgagttggactttgggcaagattgtcttgtacgcgtcttctcaggtgcctctagagatcgaagaaggtcttccagtaggctttggcagcaatgtccccggtatcccggccgacttccagtatcccagtgttcaactactaccggattcagacagcttccacagtgagcactggcatgatgcgctattcgacggtgattctccgcgccgaatcccaggcttcgtcctcttcatgcttatcgttttcatggccggctttttcttatgcggacgcagccgtcgatcgcggcttttcaaccgcgtgagtaacgtgttgcgccgtggtgggccatcgcatcccaatcatccaaagaaacggaagggactcaaatcgatgctgccatttatcagtcgaagtgccccatcttacgagcgagttctcgaggacggtgctcaagagtatgagcttggtgccgtcgagtccgacgggagcgaggatggtggacgtctttccgaggcagacttggctagactggtaccaccgaagcgagcgtcgagctggggcagcaacagcaacactcccagtttcaaatacgcgttagataatagttcgaccgggacgattggtcttgggatcagcagtggtggtggtggctccggcatcgctatggaccgagcaggcttagtagtcaggacggagagcagggaccacctagctcccattgctctaggccctacaacgaacggccgtcggtcaagagctggtagtccgacgagatctcaccaaaaatcacccaacatgacaccactggccgacgactaacgcgacgtgctgacctgaattatgcttaattacttacactgcattgcatttccacttggagtttgattgtctgatgcgtcgactcatttcgacgttgtcttgtctttttctttttcgcaaagggagttctcttcttatggtgttgcgtgcgtcgtggcaggctgctttcaattcttcatatcatatttcaatactgtgctctggagtacctttttgttggttggttacggtgctttcgttctcaggccggtgatttacacgtaatgaggtatgtactattagtgattgagaaagcttttcctgaatatagattaatacattgctagagtctgctttgcgttcaaatcgtacatcttagtatcaatgagcatatctttatcaatttaatatgctagccctagtggtcaactacctacatacagtgattgttcacacgtttcaacacatttggttatataatgttctgctggcttataactaattgatatgaattcaaactatcgatcttatatggtatataccaatcctggctttcaatgacagacagctctaattcgatgagacattgtctcggagagatgccacagatgatctagatctatcccatgcttcatataggccgcgtgaactatataggtaggcggtgtataggtggggcttggatgaactgagcagttatcaatagtatcacgtgttagttttgctaccgccttggcaaaaacgatgtagagagaaactggcgcaactaagcttccgattcactcgttgcattgattcaccaagcttgttcaatattcttctacagcacttcacctatgccgtcgcgttaaaccccaccattccatacaccccttactctcggcaacagctctcatcgccaccgccagtatgcgcttgactactgagctcattcaaagttcactaacttacatcaatccgctcacagatcgtgagctggatctccgaggtgagttcacccactatagacctgcctgaaaagaacaggtactacacttttgattaagagctggattgatatcgtcttttgcgtggtcgtgcaggtcataagatccccacaatcgagaacttgggtatcgccaaagtaagtgctttgtttctttcaatctttgagaggcagatttgtccctgttacttctttccgtgttactactagaccaatttctggtctgcagttagctctgttgtacctatatgaatccaatgttgacagctcctaggatcaagatgcgatcgatttcaccgataatgacatctcctcccttggaaacttcccccattttcctcgtctccgcactctccttcttgcgcgcaaccgtatcaatcacatccaacccgcactcgcaacttcagtgcccaacctgacgactttggtcctaaccgcaaacaatgtgtctgaacttgccgacctcgatccgctgcggaacttggggcgactgacgcacttgtccctcttgcaaaacccggtgacgcgcaaggaggtatgtttagccctgcgccgtatactagttagatccggctatatatgacatggtccagactcaattggaagctaaactaaccgattcctgcagaactaccgctactggactatctggcgcattccctctgtccacttccttgacttccagaaagtgaccgacgccgagcgcgctgcagccaaagagctattcggcacctatgaggaaccctcgtccctcgcatccaagattatgggtgtcaagtcccgcaccttcgacgtttctacccctgctgaacgcacccccgccgaaaaggccatccgagtgcaactcaccgacaaggagcgcaagcgggtcgagaaattgattcgcgaggcgaagagtttgcaggagattacaaagttagagaaggagctcaacgagggacggatacccggtggagcggatgccgatggtgacgaggccatgcagatgtgagggatgagatgtggatctctcgcatgggttgtgtcgtggatgatgaacatgcaatcacgttttgtctttattttctcattttcttctcgtctggagcttggctttctgggtttcttttctggccctattgtatctgggtattcatttattcatgtgcccttagtttgggattgggaaaaaaaatatcccagctatgaattgtgagcaaaagatcatttgatgctctaacataaagtacgtgttagtctatcaggctgaatctagacaatcgccgagctatcctaaatggtctgccggctatcctttgcttgatgacccatctagcagcccagagtttccccattccatgtagagatggaatataccccgaagttatgagtgaatcccacagaatattgggagtccacgggtctacggttccactgtattggcaaattagtcagcatgtcatgtcccgttcaggtgatattccccgagtcatctaattttagttaagagttacataccattaatctataactactgcaaaggtatggagtatacggtgtacattcgtcgcactgcatgtctctaccattagacgatgcaacctcggtgcgttggcagggataagacggcacatagcgtgtaggggatataattaaacgaccatcaggaaatggcaaaaagtatcgtttatgattcagttcatatattgtatgtacgcaaaacggaggttggttgtggaaatacctgcaaagttccgatacgtcatggccacctagtgatttcaggactactgtcttctatatcttcaacggcatataagagttaccagaatatattttctcaactgtttccttagatcatagcctatataccgatgcgtattctttctaacctcgaatatcggttacatcgagcttgtgtgagatattatggaagtcccaatagctctagttgacgcacacaactcgagaagaccatccccactatggagtatactctgtcgaagcttggaataatgcagaaggcgggtcaagcctattcatgtttgaccgtggaaataccattcaagctgtgtcttcatcccacgtgttggttatctttatcccacgtgttgacctgagcgggcccttcatgtctgagagccacctaggtatttccaagatgaagaaggggcttggctagggcctgccaagtctcgtatttcatggcgatcacatcctaacacgagtgatgcgaggggaaagggccttttacggatgtgtgtagaggcttggttgcacttcatatccgcccataatattgatgaaatacgctataaattgcatctttcccaggagctgtacagagtactcactcagcattgttgaaagaaaagccccattggtactccgtaccaaaattccccatcatgcggtatacattggtcttcacgactcttctttctctctgcctccccgtcactatcgcgacagacccccgttactgccagaataaaacggttcttgatggtgcagatttcaccctcgaagaatccgcagacaatgctcacctccctgtgctctcaaagtactttgagtccaagggtaaaattgccaacatatctacggttcttcaatccgcgaatcgtgccttaagtaaaggttcgccctctgtcggcaatgggtctccctccgaggcatgggcttggaactcaggtgatgacgcgacagcgacttgggttccgcagggaatcaccggctctggtgatgctttgaatacgggaacgtgggatggccacgatgcgtgggtcgtcagttggtatcgttctggagaaagtgtacggcttagctttattgatcgcgcaacgcacaattatcgccatgtgatgcttgtgaatcctactgccgacgataactttacagccatcgctattcatgcgggtggtatcatgtggtacggcaatgtgctgtttgttgtcgatacccataatggtattcgtgcatttgacctggacaacatctgggaggttgagattgccgatggggtcggaaaaactacagatggagggtattctgcggatcaataccgatatgtgcttcctcagatccggtgagtctatctattatcttccttttgaccaagactgataccattcaaagcaattatcaatggacacccggctccgcttctcccttccgcttctcttggatttcgcttgatcgcagcgattcacccgacaccctcatggtgggtgagtttgtgtcagctggagaaactttcgacgatgccgcaaatacgcccgtccctatccgctatgtgaaatacgatctggattatgcgacccggaagctgaagactagtgggggcatcgcttccgcaagctgggcgtactgtgtcgatatacccaacgtacagggtgctgtttcatacgacggcgagttttacatctcgcgcagcacaggcaaagctcccaagcaaggcgatcttttcacttgggaagaggggcagacagcgacagagcacacggggtggttcatggctggaaatgaggatttgagctacaaccttgttcataaggagtactatactgtcaccgagtatgctggagatcggtacattctagcctacaaggtctagttctacttgatctgctattgagattatttccaatatccaccatcggtgacggtgccgacggagttgttaaacaaatataagaacaaaaatatcacagttgccatgagagctgatacaataattgatgggatacagtgaaccatgaaagctggacttgtctaaccttgtaaacttttatttatttcaatgacaacccttcggagactacatgcactctgaagtcactacagacgattagctattgactgctctaaccagagatatctaatatctgatcccccgaatgaaaacaagaatatctaagacttaaaaagacatcaatacaatcaaccgttattaatattacctccctgaaagattcctgatacagggcgctgattggattgatgctcaaatatttaggctggcaaactgcctgtaagtttccatttttggcatcatctgggtttaaaatattcaaagcacaaaggcttgcaaaatctcatgaaaatgcatatgcttcttcttctagtgtctacaagtctatcattcgatctcatactgaatttctaactttggatatgacctaactaagtgctatccgccgcgtattgggtgctatcgtcttaagggcatagtcttacactattcaactagcatttgaattgcatggcgaacaaacaaatggcctagtatattaaagatatcaagtgcaatttggtatgagtagtgcagaaggtaggtacgatgataacaagaccccgatacaattagacgatgaactcccgaagttttttcttgttgagaatttctccttccaccaatcgccctgtctcagtgactttcccattgacttgctcatagcgtaccagcgcaggaatgttcttagtgccccacgtttttcggtagacattttgggggttattccatctgatagatatcagttcaatgcaccacagggacacgctttgaatatgatttgaacaaaatcctgctcagacacgatggtaaaacttactctggcttttgtccaacctcgatgatagctaggtcaggcgcgtcatccccggcaaatgccttgttgatgtgaggcaaggcatctcgtacgtccggacaccaaggttgcttggtaattggatctggtgaagatatgaaggcaatgaataattttgagtccgggtttactgtcaggtccttcgccgagcttggcagtgtgagattcttggtaattggcattcttgcggcttcgtatacagttcgaacttgagtgcagggtgtagacaagaagtatgggcgagacagtaaaatatttttcgagatatgaagtcgaggcatttacaatccgacatgagacaattgtcaggtggcttttgttgattccatgactaagcatatcgcaattctggggcctggtggtgcgcgaggcttcattttgtcaacaattcaatatcgcaatcagtatcacgggtcctatttcccatgaacaaaggcacccttctctaatgagtgttggattgcaattttataaactggtagctatacattctattcttgtaagcctcagctttcagtcccttgccctattcactgaattattgatgcgtgaaccgacgtgtttttcctgatgatcttcttcttttcaagggacttttattgggctactatgtatgtggttagtgctaaattgtgaattgtggatattctcggattccccgaggctgggcgttgacacttttgtctcagattcaatgtgtaaaggtagaagcttggagaaaaaaataggcaatagattaagtgcaccatcttctgcttgcacaggtcaggctcatgaatttgagccacatagggtaccaaataaaacataaatgaagtcaatggcccctaaaaacgaaaacccgtacatttaattgacctggtcacttaagtctttggcctcgacgtcctttccctcatcatcctgtgcccacatgctatcggtaggctccccaggccacaaggtagcacagagcctacgcgcatctgcccagtcttcatattcaccatcagagctatacatcattagaatggattctctggacggatgtaacatgtagcatacctaagatcaatattcttcggcgccagcatcctctgagaaggatagatgtaacgaccacatcgtacggcctttcggcagtcttgcaaaaagtccactggccgggcttgcacagtatgaattgctcataggcatcttctccaaccccgttcagatttatgcctttctcagagcctatgaccacttttgttatctcatcttcatcttaagttgaaccagtgagagggacccggccttctttgatgattttggggatatcttcgatgagttgggcccaggccttttgccattcaggtgtatcccagccaaggatggcatagtagtgcgtgtaaatgtatcctattagcatgttgtcatctttgatgatgactagactgaccccatggttaaactgaagcggtgggagtattgtcagatgaaaaaggaggaaattaagctgttggaaggtgaactcagaaccacgtcacctatggggaatctgcataacctcacaagcttccaatcttgctgcggatagagagagggagaatagtgaagaaaagagtctatcaagtgaccatttaggatgaggttttacgttttactgcatcttttgagatgagccaaatataatcttggaaaaaaaattgtcacaaagcctccagtcctctgagcactttatccccatctttcattctttgtctaactgtaactgtctttcaaaatctcatagagatgactgaagcgagtgccttcacctggataacctagttaacgctaacatctctattaggccacttattcgataatagacgatcgatgcttagctccacagcttcgccatgctcttgatgacttgagaacagctgtccattcggcaaattgctatctaactacttctcgctttctggactctttcccaaacctcagtactcaacactcagaaatccaaagagctgttgaaaaggtggctcggtttgcgcgggagcaagaagagaatacggctcaggctgtgcaaaaagctcaaacggcattcgaagctctgtctcctgaacatcagcatggcttgatgcagtactacggggaagatctcaatttttatctcgaaatcgccattcctctggacctgtcgcgtactccctcaacccctttcagggaattccaggtgttgctatttgacattgaaaatattcaccgtgcacttgctcgggtacgtggagttgaggcgagcatcaccaatgtattttccagattaccgtccatccaacgactgctgctggaaaatcgggaggaggaacttcggctgctaaaacaacgcagctcagctgggattcaattgtctaggaaattctttgccttggatcgggaacaacagagtattctttggttatggtatcaagattctatggggatcagtggaatccggagggatgacaatgcggaatacccctactctgataggagctgagatggagataaccatgagcgtggggggattgtcaattacagcagtgtcccaacatgcaaaggtagaagaacacgaatggaaaggacgggcaaatagaggggaagaataccagacgcccgtgaggctgtgacagtctcgattggtggtatcattccttgaatcactgacacatgaatatccattaacaagctatcattgacctggaacccctgctataatttcctatttattggtatatctcgcattcttaatctcctctaaacattaccaatgcttgggagtgtggggtagataacgaggattctcggccagattgccgtgtttcgggaacttgtctttttcttatcctttgcaggtccactcctctatagcgcttcggataactgtccaaattgacaatggactctgcctcgagacgacgactaagaaggcgagttgccgacgagaatcgcaaaagggcaccccgagcgtatgcatcattcgtctgagacgaggcgtatccactaactgggcttagatgcgatcgctgtaaggccaggaaaagcaagtgtgtggaggcgactccgggcaaatgtcagcggtgccttgcaagtaacttggcctgcatgtttgggaggtattcagtccatgacctttaagaaagcgcttttttaacgtgaaacagggagaaatcgcctgttacccaggatactgcgtcgagtgaccttcccgaacctggtatagttgctacatcgaccagaaaccgagcccaactactgcaagatgatatcagtcatactgatccgctttctccggcatcagtcttgtcccaaaagctcgccgaacatgttgttgcaggtcaatctaaaagggccccgtggccaaacatcctctcccgtctgagggaggctttctcgctagatccggatgctgcacccgaagagagggacatggtcgccatgcaagccgtaagccatatcatatttcggttttgagcccatgtcaactgacgaatcctagcatatgacccgtccaaaggcgcttcatccatatgaggtggcacgtttacatgcagcaattgatgcattccccccgcgcctcatcgccgactttttgatttcggtattcataaaacatgcaacagatacattcttctactttgaccaggaccaaattctgtccgagattgaccaattctacacagacaccacctcgccgttaagatctgacttgagctttgtttgtcttgcaatggcaatattcgcactaggtagtcaatggacgcccctagaaagaccagatgaatttgcagtcagcctacatcgagataatgatgatttaggtcaagtgttctatactcatgccaaaacgcttatacccgacttaattgaccgaccctgtctccgatccattcaagcgcccttcttgctaggtgtctatctaatgccagcaagtgccatcggatcatcgtatgtctacatgggcttggctttgcgcaaagcattggcatttgatctccatctcaacccagaagatcaagcagttgacgaccgagagagagaggtccgatgtcggttatggtggtcaatatattccctcgagaggtacgtgatgggactctcgctgaaataaatctcactaaccacgtcaggtgtaccactatcaaactaagcaggcctcgctctgtcgatgccaatgtagtcaaagtaccacatccatcgcctctcccagcactggatcgtctgcaaaaatacaacaatattcaattccagatggcgtatgctcgtctgatcaagatcctcgatcgaattgccgaaccgtggtatgttgggccgattccgatagaataacaagcacttatattttatcagtagtggtgtcaccgaagcggaagaacagtcagaatccgaaggtctggcttctgatcttcgacagtggaagaagtccttaccgccagatttcaagcttgaaaacgtggacaccaaagactcaagatatcgcacgatcttccatctatatttgaattattactatgcgtggataaccatgggaaaagtcgcccttgtaacagttgcccgaacgagccttcgttatcatatgtttcctgcgtcgcgccctcctggtccaagcgaggccaccttgatgcaatcccgatattgcgcaaaggcgggcagaaaacttctcctactgttcgagaatttgacacaaacccgcaagatcactcgtttctcattcacggacttccagggatgcagtattgcgacgatcgtgacgctagtggctgggatcacagaacgagattcaggatacaatgctcgagtgaaatttggcttagactgtcttcggagaatggcaactggaaacatgacagctaaattgggggtaaagtttgttgaagccgtacagtcgataacaaacgaggccgcggagaagctccatcaagcgtcatccacggctaacgaaacgcaggatgtacaaaattcggcttcgacatctgattacaatcaatgggctgaatggcttacgaggttggaacgctctcagaccctggagcaaagagcaatccatgaggcagagcccgatgtgccctttccacatactgtactgcatccaccacagtcaagcgataatacgtccgattggaggactgctggtgaacagtatatcccggaaagctcaaccccgcaaagcctagcacatggttcaactatgttgcgggagttccagtctatagagtacgaccttttgtcgggattccagagtgatgatccagcctttctcatgggcttgactgggattgatgtcctagacttctctgggctcacataaatatgtacctagtgaagagggaaatgcccgacgacacaacaccaaccatccaaggaggtcagctagcaagcttagggatcatacagatctcagaaatcatccttgtatcctagaaaaataactttctgtaagcccctttccattatgtgtcgtgtatgcgtgatttcctgtactctgagctcccctatctgacatccatgaatgagggacatactatcagcaccccaaattctgctagtcaaatattcgccaattagaaatgaggaagaatgagcggtattaaaaattcagaaggcggtataactatccaatgaggaaggcggtagcagaagtcactgtatatctatttctgcctgagaaacaaggcaactatatttctgccccactacgaagacctagggagtagggagaatgaagacaccacaccaccatctttaactcggatatatttatgtctatcatcacactcgcaacaccaactgcgatgcaatgcaatgcaatacagtatacagcaataatcattgtactctcactggaatctgaccatcctccagcaatgcatcccacctactcttatagacacgaccatccttcatcacaccaagcacatgtgcatcaggcttatcaaagacggtcacatcatcaagcgggttcttatttagaatcacaacgtcagcatggaagccctccttgatttgacccagctcatccgcgcatcccatcatcttcgctgggttcacagtagcactacgcaagatctccagtgctgataagacctgcgagcgcagtgcaaattcatgggtctgcgcagagcccagtggacccagcaaatcagagccatagcacatagtcacaccagcctccgaggcaaccctcaaagcctcaagaccagactttaacacgatcgaattctttgtctgggactcaataggcaggtagttcttccaccgctcagaagccatctgagcatatgcgataagcgtaggcgtcaagtagacccccttctcggccatgagcttggcagtgggtgcatcaacgaagttcccgtgctcaataccacggacaccattatcgatacaatgccggatagccttcacagtataggcatgggccgtgacaaaagtcccggcattatcagcacattccaccatcgcctgaatctccgccactgtaaactgcagatgctctagcttatccgttggcgaagccacaccaccggagcccataatcttgataaagtcggcgccgcgtcgaatctcctcacggacagcagcaatacactccggcacaccgttgcacatgcggcctaggtggttattgtcgtgagtgccgccgcagcattccgtagcctcatgcgggccgcgcagatcaccatgtccaccaaattgcgagagagcatggcctgcgataaaaacgcgcgggccagggaagacaccgtcttcaattgcctccttcaaggcgagctgggcaccgccacagtcgcggatgctggtgaagccgcgatgcagcatctgcgaggctgtgtaaggctggcgcaaaaggtgtacgtcattcggattgccgaaggctttggataagtcactatagcccggaactgcgcataaatgtacgtgggcatcgaatagaccggggcagagatatttcccttggcagtctactgttttgaggctgattggtgaagctgggatggatgattctgagccgatgtaggtgattttgccctcagtggtgatgagggttgtgtttgctttgattgtgcctgtttcgacatcgacgatgttggcattgatgaatttgtatccctgtggtgcagggcgtatccatggcttgatgtctgagcccgggagggtggtttgtgacatattcggcttggggtgagatgatgctgataagccaagatatcgagtttaaatattaaatttgaaagctgaaagaaatcactttgcgggggtctctcacatttgtcgggaagttggtcgacagattcccgatgccatcggaccgatgcacttctccgcatatcaatcatatcaccgacaatcgaagataagccttcttttatagccggtgggaaatccggggcatatcagttttttttcccttgcaaacttgagcattcctcctctttgactgttttgttttgccgaaatccaattatctcattcgtatatatcaaggggcttcaatcccacctgtattaatggacaacttggagaagcgtgctgcgagtagcgacaatgccgatcaatcaaatggcgaaattctcgagcttcaggggagttacactgcggaggaagagaaaaccgtcctgcgcaagattgacttggtcattttgccttttgtgagtgcttcaagctgtctttcgggatctttttcgggctaatgacgcatacttccagatgtgcttcgtctttttcctgcaatatattgataagcagagtctcagctatgctggtgtcttcggtctaattcaagacctcaatatgacaagctcgcaatattcatggtcaagctcaattttctatgtcggccagctagtcgccgaatatccatttatatatctaatgagccggctcccattgaccaaattcgtcggtgcgactgtgtacgtttactcttgcggtactactatatctgtcctgatcatgcgctaaccaccaattcagaattgtctggggcatcatatgcatgtgcctcgcagcaccaaacaatttcgccggatttgccaccgtgcgctttctactcggcttcagcgaaggcgctgtctcgcctgctttcgtgacgatcactagtatctggtatcgaaagaaagaacacaatgtccgcacggcattatggatatctatgaatggtctggcacaggttataggctgctcccttatgtatggcattggtaaaaacaactcgcttccaatcgctccctggcgcgtgctatttatcatctgcggcgcgataacctctgccgcaggcgtggcattctttttcttcatgccaaacgggccgaaagatgcttggtttttgaatgcccgcgagagggaagtcctttcgctacgcatggcacaggatcgagatggtggtgacaaggcctctttttccgttgcccagctcaaagagacaataatggaccccaaggcatgggttgtcttttggtttggtgttttggtatgcatgcagtcgccggttttgacttttgcatctcttgtgatcaagtcgatcggctatactaaccttgagactatgctatatacggctccatcgggcgctgttcaagttgccttcctgtggatcggtgtcggcttagtatttatcttccctaatcagcgaacgctagtcattcttgttcttattatcccgcctctgattgggactgtcttcttgctgaagttggacgtgactgctcaatggggtcttattgttgcctcgtggctggtatgtatttctattgaccaggtcattcttccgttgctaacccagttttccgcagtcttcatgcattacggcatccatgacaccacttctctcacttgcggcttcaaatttcaagggaaataccaagcgcgctgttgtgaacggcatgtttttcattggttactgtgctgcctgcattgcctcgcctcaactatggacccacagccctcgttatacggagggtgtgataacatccattgtaacatggtgtctgctttttgtggttgtgattttattccgcttcttgtgcatccgagacaataagcagcgtgataaacgggctgccagttcaggtgttgtcagtgtggatgaagaggtcaaattggacgaaaatgggttgccacagacagatatcacggataaacaagaccgacaatttcgatatgtatggtaaataattgtttatatttgtttggaaagtattccgaggaggttaatatgatatttggcttgattttccgcatattataaacagtaggatcccagatggaacaagcaggccaatacacaaagttatgaagagaacacctttcggagttgaacttggtcattgttaccctgtgtagcaatatcatccttctaccttgatcaaccttaatatatgcagggacagaggctgtaacaatttgcataccatttttcctctaggagcacgccttgatgatatcggccgcacgctcagcaaccgcatagacggtactctgaaggtgaccgcaaacctggaaaggcatgacggaagcgtccacaacacgaacattcgaggttccgtaaaccttcagcgacgagtcgacaacaccaccaatctccttgggaagcatggcagctgtggtgatcgggtggaagtttgatcggtctagtcaaataaaaggttaataataaaattccctccacaaatctcccagaaacgcgaatgatacacgtacattgacctttgatgaaatcagcccagccctcatcttcagcaccagcagcaacagtagaaagaccggggctggtttcagcaccaaccatatcagcaaatggttcagttttgaaaatctcacgaataaaccgcgccgcctccacctgagaatgtagatcaaagtccagcatgaagtacttggggtcaatgatagccgccgcggtggggtccgcggaagagaggtgaacgctgccgcgagagaacggaacagacccccagtattcgctgctatacgaggttccagaggccgacagcaggatctccgcaacagggataccagatttaaagatcagatcccactggatcttaaagaagcggtatatgtcgcgggctttggtgatgttgccattggcggatgcaacctgtgctgcataagcgggaagctcgcgaagaagctcggctccgagcgctgtggagttggggaagagctgggctgctgaggggtaggcgacgtagtcggcactcttgttgctgctgtaggtttttttcgagtcgaactggagaccattgttcatttggtcctgcaggttttcgccgacagttggcaggttaattttggtggcgattccgtacttggaaagaatgctagtgagtgatttttggttagccttgataagatgttgaacggggaggtgttatggttactttgggtttccgatgccggaaagctcgagcagaacgggagatttcaatgctccagcagcgaggattacttcacgagtagccttaaccacggtggttgtgccattggaaaaagtgacctcgacaccattcgcagtgacctcatggccattcttccaggtaatcttgttggcgtgtgtgttgagccagacaaggagattgtttcggttctggtagggataatagtaggcacgagcagcatcctcacggatattgagctcagaatcaaccgtcttgggatacaagctgtatccaaccatatctccgccattggggtccaggttgtactgaacaggaacatcaaggttctgataggtagtgttcaatttctgagcaaggccgtcgttcaactgtgttgaagaccagccaaccttcagtggtccagtaaagccgtggtaggccggatcaaaagcaacaccggatccatccaagaatgggtactgtgccggatcttgcaagtgttcgccctttttgaagtaggggagcagagtcttccagttccagcccttatttccgacggtctcccacgcatcgatctgagctgcctgggcacggaggtacgccatgccgttgatggtcgatgttcctccgagtgcctttccggcacgtattgtttgtggggaaccaccggcatattcttgctctatcgttttgtaggcccagtcaatgtcggtatcaaacgctttgccgtatccgagagtgtcggtcacatttaggttgttataaacggagccgccggcttcgatcaccaggacagtggtgtcctttttctcggacaatcggtttgcaacgacgaggccactggtgccacctccaacaatgatgtagtcgtaagtcgactctgacttttgtgaggtgtggggaactgcaaccgctagtggaagcagtgcaaggccgatgaggctgcgcatgattgatatttgattctaagggaggagattcaatagtgagtagcctgagcgatacaacgaaagctgtgatttctttaacaatttgtctcgaggctacacggatgttttatacttcgggtcacaatatgatttacaagcatcgtggtccattttgtattcaggaacatggcggaactctttgtcagatcagactaatcccaacacgcgatctgcgtgtctgttactccggaataaagagcaaaacagaagaacccactgtctaccaggtatcccattcatcccgaaaccgtatatctaagtctaagcctaacgggctgaggccgaaatgagaagtagacccttctaaggttgcaattgtggatataatggataatcttagcacctgaaatctccgtggttttcccgctatagccccggtaggactattaaacttcttgtagtagtatgtctactcctatctgctgccaaaatctacgccagcagatccactcgatggctgcattaaccttggaaatcttactcattcttagtcaggaacaaatatgacccaccttggaagaacttggattgataatcgtatgccgatcttattcagagtttcgcactgcctacttctagtatatgcctaagacaaggtaaccggaacccggcttcgtgtttcacttgcttctacaagctgtttgagtaaaacagatggggatactatatccacgggctgtgcaatgccaagtaatatcctatgtctagggtcaccatgctcaaattgactacttctccgattttaagggtccttttagagaactttaggttgtactaattttcatctgataaaagaaaccgatctgataaaagagaattatgaacggcggtattctcggcccgtaaaatgtcagagtctccgagtcagccgagtggcgtcacttgtggatacaatgtggagatttatgtcctctgccaatgtacaaagtacaatattgtggttgatgaacagtctatagagaaacagttttcgacactaggcatcgacaactttcttggaataaactcggctctaacacattaccggccttgcatgattcacccatttgaaagagtaccttttaccaggtagaccatacaaaaggtatgtaaatgttggttttcctcaataatatcatactggagacttcattgtgagaattgggccagtcttgacattgaaggcataccggcatctccatcttgagcctagcaaatatgtgtccataaccgtcatatgattccaacccaaaactaaggaatatgtacaatatagatttcgattaatcccgtcgatcattgattatcatccccaggcattaaccttaaattagacgagcatatcgaaaggtaccgcaggtaaaagtggttgtgaaatagtcgaggtcatagggaatcgtgtttctgacgttgctgagctctacattgcaactgagaccgtatttcgaaacacgaagaacgtgaggtatgttaacgatattcaatttatattttacccactaattaccgaaaatatatattgatcatgttccctcacaatcctaccacgatcaacaaacgaatcattataaaacgacgcgaccttcttaggtcaaggatgggaaatcctaattctccacttgactttgatattgatcacttcccaagggtttgcaactcgtgctctccgtcgtatgaaccttgctcccgcggttcaagggttttacgcttagctagattatgggttaaccctaatataagttcatttcgttcgaaatcctataacctggtaatctctcatcgactgacattaattaaagatgcattcaggcacattttgagcttgtgaatgtcttcattcatacagcttagtagacctatctttggccgtttgcagagaagtttctcccggcttctagagcatcagtgttttgttccattgtcttcatggagctatttagaaggcttaatgaagttggagaatcatcaataacaatatttactcagttgatcgcatcttttctggagctagccaagctacgagaagtcatccttgatgttctatgtcgtcaatagtctggaactcggagttgtcttattagtcgggtaatggagcttttaggagattctaagaaaatctatcgaatatgaagctcttgtcttttgaagatgtatacaacataggcaacatccagagaaacaaaagtattgtgcattgttatcgcgtaaaaagaacgtattgccggatatccgagagctcggatatataagattctgtgacccaacatcattcaatgaagaatgacttcgttcccgatttttccgacactcatatatcacgagcactagaacggcacttccaattttagtgcctaagagtctttagcgttcatcttgctgatatgattcaggccaacttctccgaagccactgttatcttttgcggttcatagtggatcaaattgataggtgttggctgtgaattttaaccaggccaatcatcatcaaactttgcgtaagccccggttttatttttaacgccataggactggtggccaaaaaggtgggagatgggttcaaaaagaactaccggcgactcaaatcttccatttcatattattcactccttctcccaatacctgaaaaggttgtataaagattgatcatgggggccgacagtatcaatctaaagccggtcgagtcggcgcgctcactcgcttcgactttctcgcccatccacgaggtctttttcgttgccattgtttgcatgggtcaatttatgacacaaaccaatgtcggagtatgtctttcgccgcttgatactgtcggtgatagctttggtatcgacgatcccggcatcttgagctggttcatggctgggtactctttgaccgttggcacattcatcttggtgtctggccggtgcggcgatctgttcggttatcgtcgaatgtttattattggattctgctggattgcgctttggtctcttgtcgcaggtgttagcgtctattcgaactatattctctttatctttgcacgtgttttccaaggcatcggtggcgcattgctgatgccaaacgcattggctattcttggagccacgtacccacaaggaaagagaaagaatatgattttcgccatcttcggtgccgctgccccaaacagtgcccttttgggagctgtcttcggcgcaatattttctcaattggcttggtggccttgggcatattggacccaggctatcgttgctctctgttgcgctgcagtaggcctgctcgtgatcccatccattcatcacgacgctaagtttgagaaatccttcttgggcctgctcaaagctctcgatgcgcttggtggagtttgcggtatcggcggcctagttcttgtgaacgttgcatggaaccaggggcctatcgtgggatggagcgagccctacgtgtatgtccttctgatagttggaattttgttgctcgctgccttcttctatgtcgaattccgagtctctgaaaaccccctcattccgttccacgcattcagtcccgatgtctcgtttgtccttggctgtgttgcttgtggctggggctcattcggaatctggatctactacttctggcgattcgaagagaagttccgtcagttgactcctctcctgacctctgcccagttcgttcccgtcggcccagtgggtatcatggcatgtgttgtcaccggctggctgatgggccgcatgcgccctgcgctgattatggtgttgtcgatgactgctttcacagtgggcaatgttcttatagcaattgcaccggtgcaccaaacgtattggggactgacatttgtttgcttgttagttaccccttggggtatggatatgtcgttccctgcagcgactctgatgttgtcgaatgcggtcgagcgcaagcatcagggtgtcgctgcgtcactggtgactactattgtcaactacagcatctcgctgagtttgggattcgctggtaccgtggaagttcacgtcaacaatggaggttacactcccagcgatgtcttgaaaggatataggggcgcattatatttagccgttggtcttggtgggctggggatgtttctcagtatgatatacgcattcaagggccatcgaactgagagacagccggtggaagccaaaaacgaggaagcttaggaataggctatcgtctagaagtacgtaagatttaatcttatatcagtataatatcagttaatcacctacaacgcggtcaagctaagcttttagcaaaagtgagtacaatcatatatgggatagacgacaaggggtaaacaaatgagaagagccgggctactaagacttgatcctgaaaatgaggctttattgtcgatatcgtggagtccactggctccataactcaatgccgcacatgaagtattctagacctttgatgtacatctctagttcatgtgtcaagccttccatggtgttgtgtcggatttcaacgctggattgtttgaaaacgagctccaattcccgacaatagctatacattaatcgtctgcaggctgtatatggtagtcctgtctcgttcgcaaggatgtagatggcggagaatggctgggcaccatcggttgggttttcctggtatactttccattctcgctcccagctatagatatcattcataacactgacatgcctaaatgcggtgctttccaaagcggctgtattttcaagtgcggtgggagtgagatcgagcttggcaccaaatctaatgagggctgtgtagagtctaaatggccgtcagtactcatcaggaatgtctgaaaatgaacagcgacagtaattcatacgttttgcccacatctgtctccctgaatttgaggtatgacccgagagtgtttgctgtggttctctcctgggacgtctgggcttgcagaagctgacaaaatccctgggcgacatcatttgccagaacctcgtccatacttcgcatggccatgacagtatcgtgaagcatccactcaagacagatacatctgtctgggctcgctgctccaagggcaactttcatgagtcggtctcgatacgacagcatttgcgtaaaactcattttttcaagttggtctatctcgagagtcaataaatggccgaacccagtctccggctatcagaactcaccgtcaattagtaatgacaagtaaagcattttgcatgtcacatcaatgcgatcatatagcgtcaatgggaaaaagtgactaaaggcgcgggataacccaagaccaaggaacccctttttctccttctcactagggaaattccaattgtcgccaaaataaggctcaacctgagcttgaatcaattcccaccctagtggatgggtttttgattccagttggcttgctgggatcgcgcaaggagcattttgtgctgttgagtactgcctggccgaattggaattgtttgttgagtagagataggatgaaaggattggccgattgacagccaacgccactttacgtcggcgttcatttgtcaatttcttccagatgcatatcctttgaatccgatgcattgcaacttctatcaattgcatcagtgaggccgggctttttggttggcagttgtcaatctccacaacggaggctgcacacatttacgcacggaccaccgaaatgtgatgtcaccaacatcgatcaaccgtgggcctgccactcttcttttatctctatttctaccccaagtttgcttcgtacaacatcctaatatttgtacttacaacaccaatcgacactctctccttaccatcatcctatcttgaaggctgaattccctattagctctatccccaccaatccgatcatcggcgtttgcaagagaaagaggccaagatcttcgtgcatatggttctagcttctacctctatcagccatcagagctctctgcaggtggccctacgacgacttagtgcaatcaaggtagatagtggaagtctctcaacaaaggttgtcacaatgagcgcaccatcaggtccgccacgtgccccatggcgcgatctccttggctctcatatcgagcaaacacctggatgtgaattcacaattgcaacaattggctacaatgctcaacagcatcctgtacctcgcctgcggacttgcgcctgtcgtggtttcttcccagaactcgagctcaacgctaagggccaggaagctatggatcagcaggtggaaggcggtgctaatccacctgtattcgaaagtgacatgctgtcatttaccactgatgctcggatggacaagcttcctcaactggagtcctcgggtcatgcgactgaggttgtattctggctgaaggacctcatgactcagtggcgtgtcaaggggacggcatatgcaattggcaacccaagtggagaagatacagaggaagagaagctatcccgaactgagataaaaaagggattgagagtaaaggggaatactgacagtgacattgcgaaatggacatgggaaaaggctgtcacaaagtattttgcaaatcactcccctatcgcaagaggtatgtggtctctatcttgattcttgggcgcaagtgctttatgccttgctcttatgccgattgaaaaccccgttcgcctgtcatcgcctgctcatactgactgggaacctaggtttcttccgatcccctccccctggacaacctagatcctcaactcctagccaactagatctcaagctaggtcaaaaagttctggaccttcatgaccctgttgcacgggcaaatttccgagtcgtcatcattcggcccgaagaggttgagtgtttagatcttactgatcaagagaacggcaaaagatggaactggacgttgattgacggaagcgatggttctcggtgggatgaagccgagttgtggccgtgattctaccaatattgcaaagacacttgttctcctggataagttgtatccaaaaaatgtgtaatcgctgtcttattttgatatttgcatgacatacgttggatgttttcatcttaggttataagggtgtatatctataggcttcaatagagtaccaaaaacggtcaagcgaaatgttggtagtttgcataggatctttgtttgagcagtgtctagtgctgaaacttgcttgacctgagattttgttgtgctttctggttgtcgcctgcctgaaagaaccctcacttctaccaacttgtcacaactttcattcaccatcttattctatctcattagcaaaagtaacttccctcaaaactgatcccttgacctgccttatcccaactaaatactgaccacggacacgttcatatagtgcctgatactgagatgcctagcgataaccctgcctgtgctgactgtaaggccaagaagaagcggtgcattcaccgtaaccaacctgtgaaggtcgcgaaagtcgaagccgtctcagccagcatgtctgccccctccgccaccgctactgttctgacgcctgcgtccactccagtccctgttgctgttgccggttcctccaccagagggcgacgtaagaccgctgatgccacaacgaaggtactgacaggtctgccgttgacttctggtttggattgtcgtaaagctaacacacagaacataggagatgagtcccgctcctgccgactccagcgacgagctttcttccgtgccctcggaggccgaggagaagccgatggccaataaatacaccacgcacagtcgccgtgctaagacctccgccgcctccgagaacgtagccctggcccttgacctctcgggtgattctcttcaggccgctgccaccatgtccgtccaccgtgtctgggcccgcgaacttcgggacaacctccaggaactcgagaggtgtatggaggccttcgatgaagctcaccgagctaccatggcctctgctcaggctatccagcatactgtcgacggctggattcagacctgggctgcttctggtcattaagcattcccaacgttcaccatcgcaccattttgtagcattggaatgggtacttgcggtcatttgagatgttattggggggggaactactccggactggttctcatttgagaagaggaaattcttcggttcctgatatagggcgtgctcgaccaggtttggacaattcacgtggctcggcaccgattggtttctattttggtatgcctgcaagcatccaggcctatgaattcgacatgtatgctccgtatttgtaggctgtaatgattcgcatagcgcaatcttggacactagaatacccatcaagatttgtgtgtgtgtgcctaaacctagagacctcaatgttgtatgtacaatatactgagtactccgtagcatttttcaaaatatttgaaagttgtcgagtccgagggggtcggggacagaagtacttggtggatggggtttttacgatacataccagcagctacagcctatcaatgtgggttcccccttccccccccccccccccccccccccccccccccccccccnnnnnnnnnnnnnnnnnnnnnnnnnnnnnnnnnnnnnnnnnnnnnnnnnnnnnnnnnnnnnnnnnnnnnnnnnnnnnnnnnnnnnnnnnnnnnnnnnnnnnnnnnnnnnnnnnnnnnnnnnnnnnnnnnnnnnnnnnnnnnnnnnnnnnnnnnnnnnnnnnnnnnnnnnnnnnnnnnnnngtcccccctcccccccccccccggtctccaaccactgactctcccgagtcttccgcggaagggatcgtccggcttccaatagcgtgatagtgtgccagggtctcaatttttagtgtttgtttttcataaaacacaggtgcttttgtacaatgtaaagtccccgaaagggcacttacgtgtcatctcctaccaaaggtacccatggatatcgacaagactattatttgcctcttctattcggcctggtctgattcgactttcgacagcaatctccccatttctgttgccggagactcgactttctaaggatgggcgcttatacagatcttctgtcatactgattatcatgaccttcttttgagcctatgtcaaaacgctaccacgtctaacgatcaatagtatacaacatagagcaagctaaagtagggctccgtacatttggtcccttgaaagcaatactagtctagtcagtctgcacaaatagatactaatacatgtagcaatcctacctcaccgctcaagtgattcacctacaattcctgcaggattcctatcaaatacatcacataggggtgtcttttccgtaccgaaactgcctagccccatataaatctttttacaaatcggtacggcccaccgaacacggtagttaccatactggtatcatacggctcttcgattatctcaatttccaaccctcttttctttcccttgtgcctattcacttcccctctccagactctgcttcaccgttacttgatttttttaactgcagatcctatccaacgcacagctcattattgaggggttcctaaagacgccttctcttccaccctaacccacacccgcaccgcgatctaccttctccgtggcacaactttgtctcttcgccgtgaaccattacgattctggtcgacttacgatttacgacgaaacgaacaccggaaacacccgctcaaatataatactttaacgcttgattctttgatttccgtgaaagcgtggcaacaccggggattcagcaatcgaatatctgttagccatggcatcaatggatgctctaggggccttcacctatatgagagacaatcttcctgcatggatcacccgcgtctcagagcttgctacacacacccacaagagacacgacgagtactctgaagcttacagacgccacgtaaacttcaagccccgccgacggaaaaatagctcggtttgctccattcataccgatgacctcgttccgatcgcacaaagaaagagtcccagcccagaacctgtggtagttgggacatcgcaggatgcgcccgagcaaggccaacgttcagatcgcaagcgcaccacagatgaggctccatcagtcgagtccaatgaagaatacaactcgttggtaagcacacggcacaatgtcatcatcgagtatgatggccatacacaacaaacacttgaggcaattgtacgcgatatcggggtggccaggaacaacatcagacgagggcagatgtcattgatgccacgtacagggctgcgagcgagcttgttgagcaaaggcgtgatgaatatgccaagtgcactaggacagacaggcccactctcttgtgttcgcagtactcgactcacatctgggcttgtcggtatctccgggaccagcgcacttcggagagactccccttttgactatgcagacaagcagctggaacttgcccattcgctttgcgagacggcatcttaccaagtccttcgatctggcgattgtggaacggaactggacggggtcgaggagaagttcaagatgctcctcgcgacggctatcaacgagatcgaccgtatcacggcagaaaagaagcagcaagaagaacaggagcaacagcagcaagaagggaccgcggaagagggacctcccaaaccgccccctaccccctccgcagcgcgactcgcaatggttgcttctcttgcaatgaacaagccctcgatggccacggcaggcaccattgaagtcgatgataactcgtctctctcggctgaatcgattgatctctctgcattccggtcctctcggatctgagtgtacacacgggcagccagcacttgacctcatattagccatttagcgtgtgttgaaccccttccagcaaaaccattgcagccagttgataccttcgatctgttgaggccatctctttctctttgattggccttggttttttttgcctttctgcatctttgattgcgatctgatttgtagttgcgggggcgcatacgattacaccattcattcccttgtttgcggtccatgttctattcctccttcttactgtcttttgatcccatttttgaatattgctgttcttgtttaggatacatacctcctgcctgtctcttgcatcagctcatgactcattcccaagggagcacggcgtttttatcactatttatgtgttttcttctgtggcttgagtttcttcgacctctctgcgttcattacaccgatcattataccgatccattctgagtatatatttatggcatgaatttgacttgttcgtggaatttttagctccgttggcaaacttgcatgcatgaggtcctatgcaacatacaacaaagaatcgtattacattcaaggcgtaacggtccggacattccatgaccgattgagtccagttccaccaataatgtggaatgtactccgtacaatgacttccctgtaataatcccatattcagcctggaatgtcccaatgcatgaccgttgccgttccctgtctcggcacggaaagacaacgccatgcatgtcttttgattgaatgattcgctaagcaagcgaagtcgccacaaggacgggctccgttgcgggtccgggagtcatcgagtggttgatactgtaaccgtcctaattaagtataggcttaaggtggagataatgagtatgtaggtgggggggatcaattctttgtgcaatatatgttgtacatactaactatcatctgcgagtgcattgccgctcaaagcgtctttattgttccaagctgcggattacaatatacgtatgtacgcatctttcaatgtgtcttttttgagaggaaattcaattaaaataactatactccgtacaatgtactaaaaaaagtccctaatctagccatgcgtgcgtggacatgatatcgccatgcatggtctagacacaattttttcggtctatcatggatgtagcaggtgaaatcataacaacatatgttgctcccacctggcaggatgtgggtgcagggatcttgcttctcgaatataccaaagtacatacatacaatgtaattatattctttccctctgattctatggacttcggcagcctctatccctaggtctatccctaggtcctccttgggaaacagtggttcttttgagcataagctctaaagatagtgaaagatctcaatccaactaatcaaatagaaatataaaatgctatatgcttatcatcagagcggacacttgattcttatgatattaatacatacagtactccatacagtaattcagtatgtattgtacggtgtatagacctcccgctcgcccgtctccttgccgatcaacacgctgtcaactttaccttccccttttgggtggcacggataattattccagttgtttttttcatgggacaaaggtaccatgcaggagagggggagaaagacaaatttgagtctttctataatagcattgttttcgaggttctgctgtgcgaaatacaacatactacaacatatatcgccgtatattcagaaatgcgtcctacacctaataggagatgccgcaatagatttacagtctacatagaagataacccaaattggtatcatggcccccacccctactagccggaattggcgggtgttaaaggataagccaagcaagccaacgcggtgtcctaccggaagcccttaattaatcctgggaaaacaagtatatttccatcgcccttggcggcattggccctgtctctcttacttggtgctggatttacaaggatgtgaatcaaggtgcacatcctatagtaggctcctgccttgtttggaaagaggcgattctactagcttactatggaagattcttctaatttccattacagttgtctcggggagatgttagtacttctggatgtgatgtctatattgtggcataatcaaatctcgcttgtaagaatactccgtggtgtgctggtacacagcacaaacttctgtgcgggtattcaattgtactcgaaagaagcttacggagtacttgaggtgaaacaagatattttgggggtttgggattagatacgagtaaatgacagtctagaactagctgtatcaatgacctcggtctcgacaaaagtacctacatgtcacatgtgcacaggatgtacttttgtaaagtacgaaagaagattgatcgtatctacaacttatgacaactgtagtgcctacgatgtactgtgtagcgcaagcctcggcagtagagagccagcttatttattgatcgattgataattctcaatccggtggccgcatcgcgatttgcaatagatccgagaagtcatttacgatatacgaagtgaagtgccccatagagaagaacatatactatatattcgagaaaggtgagcaaccttactatagtaattacatagaattctttacaaacccaggagatgaatgcttgatagtcaagttgtagtttccgaggaagctattacccggttctagacgctcttcttcaagcccaacaaccatgcaaaacaggcaagaaatccatttaaacattttgatattaaaaataataatcaaaaatagaacttgatgcattgacggggaatcgaaccccggccactacttatcaacacttcagggaagtatgaaatggaagagtagtattctaccactgaactaccaaagctgtcttattggttctgtcgccttattacgaaatctggcatctaaaaagttgaagcattaattccctagttttatagaactacgaggtaaaatgatatatataaatttgccgtaactagtaagtgtacagtggagtgctaagggtaacccacaacaatatccgggttcataattgcttcttaaagtcagcaaagtagagattgaccgacttgacctctagggctggccctatggaatgcgcctactgaagtgagaagactgaggatgattactgagctgcgaggactggaactttaccttcggagggccgcacatggaatgtactcgattgtgtaggggtggtgtatttcgcagttggaagtgcggatgacacactcactcactaattgcatctcaaccgtggcatgtgcttggggaattcgtgtgatctagttagatcgacgagaggcgtgtacaaaggaaagagcctgcgctggaggtttactcaagcaatctacttcgctgcgtaagatcaagtgctcgagctaggtactcgatgtttgaacaccccagatttgattcaccgtgtttctctacaagaggaactacaagcggatcttacttaatgggacattttgatgctgctggtgagccggggtaactcggcgaggtattctgtataaataggatgttttggcagcgtggatgtcaaggtacacaaccatcactataactgtaatttgacatattttgattcagtatcattcatgtccaatcaaacatcaaacgcaactaaacggatatcatcactcataaccccttgttccttctattaacccattgaaaatgctcaacatagcccagccctggaatacagacggtacgaaataagaaaaagaacaacataatcaagtcacaaaaagcaacatctcgtctcacatctcctcgaaggcacaatcaggatgcatgacgaaaaggacctttccgtcattttgggcgtcgtcatcggttccatccgtgaggccagacccggagatacgcagcaagagcttgtcctatagagtaactttattagtgacgttgcttgatggaaatttacgaatattgccatagcaaaggaagatctactaaccttaaccatgcgtttcaagaccttgcctgccaactcgcgctcgcgctcgtaatcttctttggtgttaagttcaccctcaatttgctccaagtaccagagtacaagatcttcttgctcgacaccctcgcccgagttcacctcatcctcatgtacccgcctgacaatctggttcaggatcttggcgtacttgtcataggtgatcttggtcttctggcgttctggctgggcagcagcttgagcaggctctgcaacgtcacgcatagggctgtcgccatcattatcgccatcggccatatcctggtcttcatcgccatcgttggtgtgagtaggtacatcatcttcaatctcaacatcatctttctcgacagtcacgatactctggcggagaagatcgtatgcctcaatgacgaacttgggaactacctcctcgacacagttggccttggcgacagcctcagacaaacggatcaaagactcgagctggcgaacagtgatgcggtatgaagagcggcccacgcctccctgggcgtcgttggagcgcagctccttgtatttctcgaccagcagtgtctttgcctcctccgtgaagactgggcggaatgtgcgtgcgaaccggatgtagcgctgcagttgttctgtgctcagctcgggctcaacagcctcatcgcggtacatgtgtacgttaacaatgtggttggccaaactgcggtcaacagactcctttggatcatcgcggataacaaagaacacatcgaaacgactcataatgggagcgctaaagttcaagttgttccgaagagtttgcttcgggtcgtaacgaccattaacagggttagcggcagcgagaattgatgcacgggcattgagagtagtatggataccagccttggcaatagaaattgtctgctgttccatggcctcgtgaatagcgacctgatcggcgatatccatcttgtcgaactcgtcgatggcacaaataccaccaccattctataaggaacatgtcagcgatgagcccacactcagttggagccacatttggaacataccgcgagcatcagtgcaccggcttcaatggtgaactcgcctgtctcgggatccttcaccaccgaagcggtcaaaccagctgccgtagaggctttaccactggtgtatactgcacgagggtgcagtgagcagacgtatctgagtaatcccgtcagcaagcaatgtctacatatgaggagtgggcaaaacttacttcaagaactgactcttactggtcgacggatcgccaacaatacaaatattgatatcaccacgaagtttcatgctctcaatcgatgtggacttgccgacaccaccaatcaactgcaaaagcagacccttcttgatttgacgatgaccccaaatcatgggggcaatcgaatccacaagccgagagtaaatataatccgagtgcaccagtcccttgagatcctggacttcagccgaggtaagactatgtaggaaagcttcttgggctgattcatctccaaggtcatcctcctggttttggttcaaagaagccagaatattatttgactggccactcagctgctgctctggcttttggccaggagtggttgtgtctggagtaaccatgcatgaaaggaaggccaatcggtaagtcagatcacgtacgcccagagacttcaatccagagactccactaccaccgacctcgttgccccggaaggagttgttatcgcggacggcctcagggcgcacaccgggaagacccaattgactgacatcaggaacaacaatcaaggtgcctgtaaatacgcagcgttccccagccttggcgcgatcaaccatctcaccacgcaaaatgacatccattgtgcgtggcatactaccagtcgggatttcgtgcgatgattcctggagcttgactttttgccaatcgacaaatgtactttttccgatatccagacgccatcccacgcggttgccgcaggtcttattggggcaatccattggctccgtatatttgaaagtctgctcaacatttggaactactgtcttgcaaccttcgcagataaaagttcccagtgataattctggtctgacctctgaagttcttgtgacagttccagagacggaaagcaattttccgatctgattcgtccgaagctgtcgcagtctggaaaccaaaggtaggttataaaatgcaagggcaaacattttgtcggtttgctggtggcgagttttctcgcggatctgacgctcgaggtcgggattatctgaaactcccgcatatgctgaggcaaccgaggtgctggctcgcgaagaggcgctggcagtcattcggtgggagacgaagtattctggttcgtacttggcgatgagattgtgtagtcccttagtaaggaagggttggaaccgatagtattggctggcaatggcatctgccaagacgggattatggatgtgcgtgaaatcaacgtagagagttgacagctcgaattttttcatccccttaatctgagcgatataatacttgtcactaagaaactcccctgatgagggcggtgcagaagacgagggttcgtcgatgtatgactcgagcagctcttcaaatgcctgctgaactttctctgccgcctcatcgaccaccggcggcgccgcaggggcatatggattccgcatacggctgattgccgaacttcccgctccgacgacttggtcatctgggaaggcattcatatcactcatagggccattgctttccgagcgccgggagctgggcagattatcggagcggaggtttcgatcgcgagaaggcgcagagcccagctcggactggatcacggcgtcgaaaagggaagacatggcaatgagctgatggccttagaatggccaatgtaaagaagggtattaagcttccacgtgtgaggagaaaaagggaaatgtggagagatgatatcgtagactcagtttgctatcttagtttttcgtgggtctcgttcgcgggtctccttgggcaactagggcgcgacgcgaacgcgtattcggaagaacagttgatcctacaccgacgcgttaagtggtttcattatgtaagtatatacgctaacccatctaggcagtaggtccttcatcttcactacaaataacattgagtgtctgacctagtgtccccactaccgctcatatcaggcgtataaatgtcaagacccgtatttttcgaggtcatggcctgactgctggtttgaaacatgttcatacctatgagtgaagggcggacagaccagcatatacttggaaactgcaggtttggccggtttggcttgttggccagaattatttcgcagtcttaatatgagagttgtgaatttaagtgggtcacggtcatatatcctcggttgtcacttattgtgtggaagggagtatcccaaatccctacttcatattctggagtacaacgtaatatatatttgaaatgaaaaaaagttagttttggtgtcatcagagccaaaatagttgcagagaaagtaaagtcaggtcaataatgtaataccgttctgacgtgcatataaccattttaactaatactccgtaccccgtcttggaattaattaaatgccggtttatccattgggtaaatggttgatgcttggcgcttatataagagcttcttccccccggggtgcaagtcgagcatctgaaaccatcctattttttttccctccccgggaattatactcccctcgcattgtattgcctcgtaagttagactattctgtgctagcgtgctttccttcatgccctttcttccgcgcatattctccgtgaccgtctgacacttgtcatgacgtaggacttttgtgtcttgcgatggtttcttccaaatcccgagtccttggctggaggaatcttggtgactatcggtcggttatgcagttttgaccgttccattgtgtcgacaaaggaaatctttgttttcgcagctcgacatgtctgagaacgagcgacggttagtatcgacactgaccaggcccggcgctggcccaccgttgggcccgtctgacacggatgcatcgggtatgccccctctcgcctttacgagccaatctcccaactcgcatgcacaactcaactaaagcttctcgtatagcaccttctgcctctggccatggctcccaaactgccaaacccggaaggcgccgacgcgccgctgaatcgacgaacacacctcccaagaaccaacacttctactttgtcgatcagaactcgtcatccaaagaaaagcgtgctcatgttatgcgccaccatgtacaggaaaaaaggaaacagcgcaaaatgtcgcatagcacaacccccacagagcacatcccagattatatctcatatccggcgaagaaagaggcagaaactgctgaaaagactggattagagtcgcgctcgacagctgcgccaaacttcaccaatggggaaacttcggtacggaattcgctttcctctagtcaagtacttaggccacagccaaggctagactgtctaggtgtcggcttagcctgcaaagcatgatggatctagatgctaatgccatggtgtgtcacagcttcaaattcgattttcaaatatgaaaccgcaacctcatgctcctgcgctaccacccattggctcgccaatcacgatactcgatgcctcgcgaagggatccgttttctagtctcccaatggaatacgataatagcgatattgaattggctgactattggaggaacaagttgatgtactggtccggacaaaaccttcacttgaaaaaccagattttccggacggccatgggacaccctctttctttcaaggcagtagttctgtcatactgcgcgcggtggaaagcacagctgtacggcatgtccgacagcaccgaaatccagcgccatgttggtcaagccgcgaaaatcattgatgacattacctcaggctcggtgctagtcagagcggatgatcttgcaatggccttgggtggaatggccttacacgaagggcgcttcggcagcaaggaactggcccagatacatgtaaaccgcgcggtccaggtcatgcgaccgcgaacaggaagcaacaagcccgtggaggtgtttattcactacatccgatatctgatgatgccagaaggccccgatattagttttaccgaacagcaatggctgctcacttttttgcgaggagccgaagatctcatgcggcaacacagctcccccgaatacctcctcgaagcaccccatagactcacggctttccagatggaaggtcctctattttccctgctgtctagtgggccgcggccctcccaagtgccgcacgaatctcgtgtatatgtggttcgcgatgcgcatacccaagaggtcagccgaacggcggccctcatctatattacggccgcactgtgggatttccagaattccccaaataagaccgaccggttccttcagtttttaagtaccacgacaaaacagcaccacctcgatcgtgatccagcttgcgaaacccttttgtggttgctgctggaggaagcgcatgattctgatttacaagaccccgaacgcggatggtccactggcgagctggtcaaggcgcacaaacggctacggcctgacctccagttccagttcaacgagattctcatgagcttcttatcttttcagacacccattcgcggtgtcaatgcgtttgaagaggagcttcgaaatagtttacataattctcaatgaccaatttttattacttggattcgagtcaacgcagctactctgtagttacaattatgtcgacaatggaatgtcttggcagtacccgagtaccaggataagcctaagtgtcattgagttcaccgtagtggagatcaaggggaccttggaagctccgctgtttgccccggttccagttttccagacaatttgatattcttcgtagtgtatggatatattacgtaggaaaaaaaagtagctatgttgtacacttggcaaagaaagatcgggtagctgtggtgacgcgatacgccgactacatatgcatttggttagcgttgggtggatttgctgtggagatagttacctcggcgttacgcatgcgctcggaactctctacaacatactaattcatgaagacccaccgtgacttttgagatcgatcgtgatgcaatttgctgggctatggctctaacactacaatgtggtgtatatcattgcagtattggatcaatgcggggcccacgattcatatcgcaactaattctctcattatgggatgtattaatatggcgtaggaaatgctgcttttttgttatttgggggcgcagcggaggtttcaagttgtgagaatgtcaacccatcttagggctcgctaatttcacctacaacatggttactaatttcgacttgccaaggggtttcatgcaactctcggccccactgaacacagattcaggtcaataggggccaatagtgcaatccactatccagccttagcgctctctgtggcaaaaaatccccatctatacaagagtgattggatccagcgcaaatatgaaatgatcattcgacgatcgcttcatggcttatcgaattggcatgcaatgacacgaccgtaatgatattgatagtcgaaaagcagaaagaaagaaagcactaacccagaacaacctgcatgtgcatcgtttgggactctgatctgcggagacacattaatattactacggagtacatacccctggattctccaagggcaatagacaaattccctaaattccctatgacctttttccatttccgaatatgtgcgaccgaggattctgtacggggtacagagggcggagtatttccaagaagtttgttttatcccatagcatcccttacgcagttacatccctgctgtcatgatcgccatgtatgatcagctcatttatcttgaataactgtggctgtggctggggttctgtggcggacatctccggtccgaggctggaaaaattcaatctcggattaaaaaaagatcttacgaggtgattggatcaaagaatgggtcattgattacgacgaggggatctctgctcgcatctcgaccattgagcgaaaagtctggattgcccactcgccacccatggatggactgtcgctagatgtgagattaggttcgattcctgggaaaaaaaacaagaaaaatcacgattgaaaacacaaaataggaaagtagcccaaataacaaaaaacataatcaaagattgtccaattacgtagccagatcgcagatcctagtccttcccctccctgctggccatggatccctactaaactttaagcttctctcggtcttttccctcctatctttcatttttctttcacacttggggaacccatcctcccctcgacacttcacacccgtggattcgaagagtgttttggacattttgaatacacctttgcgaataccttcacaatggcccacgatgccgtgcactggctggccgccagggatacggtaagctctgtcgaacacctaggtagccggtcctttactcacgatactagagcgacgacccgcaggacaccacgccgacactatctggtctgctcaccaccctaatccctgctctcgtctccttcgttgtgatggtgttgctcttcatcatcctgcgcaagagcaatcgcaggatgtacatgccgcgaacctacattggatacctccgtccctggcagcgcacccccgattctccaaccggatcctggaactggatcaaggcgatgtaccagttacccgacacctacgtcttgcagcatcactcgatggacgcctacctcatgcttcgcttcctcaaactgtgctccgtgatgttgttcgtgggctgctgtatcactttcccgatcttgtggcccgtcaatgccacaggcggtggtggaaagatccaactgaaccttctgagcatctcaaatatcgacgagactcaatacggtcgttactatgcgcattgcttcctcgcctggatctatgtctccttcatcttcttcatgataactcgcgagcacctattttatatcaacctccgccaggcgtacctgttctcacccgccaacgcgagccgcatctcgtctcgcaccgttttgttcacagccgttacccaggacctcctgaataaggaaaagcttcgcaccatgtttggccgcgacaaggtcaagaatgtctggatcgcaaccgataccaaggagctcgaggagaaggtcaaggaccgcgatgctgctgcgatgaagctcgagggtgcggagaccaagctcattgtgcttgctaataagacgcgcagcaaggctcttaagaagaaaggctcggccgagaaccccgagactgacattggcgatggccagtttgatgatgagtctggctccgtcgctgctcgttgggtggaggctaagaaacgacccacacaccgtctcacgatgcttattggcaagaaggtcgacactatcaattgggcgcgttcggaaatcgagcgtctctctcccgaaatcgaggagttgcaggcccagcaccgtgctggagaaaccaagctggtctcctccgtttttgtcgagttctaccatcagtctgatgctcagtcttccttccagtctgtggctcacaacctccccctgcacatgagccctcgttacattggtttagaccctactcaggtcatctggtccaacctgcgcatcaagtggtgggaacgcctcggtcgctacgctgccaccatgagctttgtttgtgctatgatcatcttctgggctatccctactgcagttgttggtgccatctccaacattgactctttgaccaagatcgttcctttcctgaagttcattgacagcgttccgtcatggattaagggtgttattaccggtctcttgcccactgtcatgatggcagtccttctggcgctggtgcctatcatccttcgcctgatggctaagttcgggggtgcacctagtctaccagctgttgaactgaccgtccaaaactggttcttcgcatttcaagttgttcaggtcttcctagtggtgaccgttgcctcatcggccaccagtgtcgtcagtagtatcattgacaaaccctcgtcggccgcctcgctgctagcccagaagatccccaccgcgtccaacttttacatctcatatatcattctacaaggattgtctttcagcgccggtgctctacttcagattgtcggcctgattctgggcaagatcctcggcagattactggatagcacccctcgcaagatgtacacgcgttggtcaagcttggctggtctcggatggggcactgtctaccctgcattcacattgttgactgttgtcggtatgttacacgagtgatcgatttatttgtttatgacactaacgtttctcttagcgatcgtctactcttgcattgcaccgcttgtcatgggcttcggtaccattggtctatacctcttctatttcgcctaccggtacaacctgttgtacgtgtcgaactcaaccatcgacacccagggtagatgctacacccgtgctctgcagcagctcactgtcggctgctacctgtccatggtttgcctgattggtctgttcgccattggcaccggtgccaatacgatggctctcggtcccctgattctgatgatcatcttcttgatcttcgtcattctattccatctctctatgaacagcgccatggagcccctcctaaactaccttcccaagaacctcgaggcagaggaggagggtctgctcgccgctgagaaggccaacatcagtactctgaacgagaactccaagaccgatgacatgtccggtcccggtggctccatctcggcctcccgtgacagtggcgtcgccaacgtggacaacagcctcggcagcgtcgactccgccgagaagggtctcaccgagaagtcgccgccagcgcccaagccgaactttttgaccaagttcctgcgtccggacctgtaccataactaccaccagctgcgcaagttggttcccagctcctcggaaatccctacttaccctgctgaggtcgagcgtgacgcctactgccacccggccgtcagctcgcacccccctcttctctggattccccgcgaccctctcggagtcagcgcccaagaagtcgctcacacttctcgtgtcattcccatcacggacgaggatgcctatctcgatgagaactgcaagatccaatggaacgaggagaagggagagccccccatctacgaggagaaggttacctactaagcgccctctctacttgcgcgatctcgatctagttctctattagagtgtctagccgatgctctgtctcaccggccggcgaatgcaccgtgttcatatatcccttgtatacagacatgccatcgccgacctggtttcttctgtgatacccggccggctagtccacctgactggctggctataacccggccattttgttatatttgtcaatctaagattggtcttgagcttatgtaactcccggacctttcgcttttcttttctataatctcttaaaataatcaatttccacttcgcatgtcgataatctatgttttgagaaagttagccatggaattggaaatcttgaccatcctccactattctttttttttggattacttattgcatggtttttagccggccacttttggtcatggctgcaaatgatatggtcaattatctatctttttctctgattcctacgcagtcccttactctatttccaagtaaatattcttctttgtctgcatgtctacataccgaagtcatagcaaaccaaagtcttctattttgagcaatgcggtcattgcgcgatccgatagcagttcgtcgaactctcccagttcctatctcagttgttcggatgaaatgtgctatgcagtttcaccttgttgggctatagcgtatgtcttcgcggcgccttttggtcacacccatcggtccagatccaatgatataccgttggctggctaagtggccggtgtgagaaggggttctcaccctattctcacccagttctcactcagttctcaccttgctggctcgtcgttgctgctgcgatgcggttcggtacctccgctagatggggcgggccaccgtcgggcaccgataattggtagattcgcagcccctaaaacagttcaaggcagttgaagatgagctcgaagcacaacaatgcccgcagaaggctcgacttgatgccataaagcagtgcaccacactcgaaacaatgtcgtgctcgctgcctcgcggcgctcagtgcatgagagtataggggcacctgtcaccaccccgttctgcaacaatgctctctgggtacattgaagaactctgactggatggtttagaaacgccaaccttacaaacgagggagggacaatcgtctgcggccgaatcgacgtgggtatcgtatggaccgaatgcccaatctagctccttactagatacaactctgggagttcgttccgtgccttagtcggtgaaatctcctgtttgtaagaacaagcccatagaattgaggcggagaacgatagtacggaaatttccgattatacgttcatatagcggactcggcgtgcgcgactgtggttcgaacacctggcaaagttcaaggtctgtttcgatctggggtaaagagacgttgcggaatttcatgagcctagatattgcgatggtgggggtatgcgcgtcgatatcatgtagggagcgcgggcgaagtgttcttgcgttgggaggcacgataagatcgttcgactctcttagaaacggctggtaagatgcttgggataggagtatagttgcagtggtccttaagcctcctatcgtgtctgctgtattttgtggtctatgcgttgtgaagttgatgtatggacgcaggtagacgttgtcggtagctacaatgtagttaattgataactctgggcatgtaactaagttagttatagtttaaggttatataagtatctgactgcacataaaccaggcaagatggaaaaaggaagaatataacattcctatctaactaggtagtagtataagatattttaaataccctttcaggtatcctttcaaagatcttttcaaattgtcccttaagatgcctataaatatctatttggaatgatcagtggcatactgatgcacaattcctacaaaaaggctttctcatacatgataccaatatgatagacacagccagcacatcttatgggacctagactacccgttttgatcgaagcaatcatgatcctggtttcatcgtcggttcaggaattctttagatgaatctctcgtgacctattggccattcaacctttcatccgataatgtggaagttaaggttcgctggtttgccttgaaaacttaccacgttgaggtatatcggggtcatcatatttccataaatgcagcctctttgataggcaatttgcaacgactgcaccatcgagtgacatcagtgttctcgtcttcgtcgccgagtgtatcgaaactttcttcacaataaggtgtagacagtccgtgataatagcccgtcgcttgactcgtggggaagaggcgtggattagaatttaaatgccccacaggtgtattacgtagacacgtacgtacatctatgatagtccatactagtgtagagcacaatttagtgaattgcactgttctaaagtcaagacatcgctatcctaacatatagataccatctcaaatgtttatttttctcccatgtagaaaaataagtctttcatcaagatcaacagatcctgattctaaacctgattccaacatgacaatggagaatagtacctcgaccatgaaggagcataagaaaaaagaggcgggataaccacccgctagagcaaaaaccaaggaaatcacaaactaaaaaagaaaacgtaccaagaagagaaaagacatgcaacacaaaacagaaggaggccatcaagacatcacgttaaaggaaccaaaaaaaagtcacacacatcgaggttggatccgaagggtatcaaggggaagggaaacacattttgcgacaggacgaatggcaagaaatcggacaaaaaaagaacaaacagacatcatgcatacggacgaaagatcacagaaggatcaaatagttcgagggcgcaatgcctgtatctccattttgcttccgagcctgccaccatcggccgctcacatcagatacttccaagatctcgtgcttggcgaagctgatttcgttggcgtcttccgggttggcgtcatatgagtagatagccttggcgcggtaggggtagtctgttggctgaggcacttcgcccacttcttgctcgccgttaccgggagtctgagggttgggggtaccgaatcgaggcgcagaggaggttcgttcggcgccgggcgcaccgccagggtacccggagacaggggacgaggtctcgaagccgccaagttgggcggaggtgtacatctgcggggtattgctggttgccatggtatctgggcgggcgccgaatgcgctggacatggggcgactaccgcggtaggagggctcggcgggctgttccttgttcagggcgaaggagtcgatgaagccgcggtgagtggcctgcggtgtggagccgaagtagaagatccagacgatgatcatcatggaaagcaggatgaagcctgcgccagcggcttgcatggatggttggtttccgtagatcaggttgtttgcgctcgtagatgttaggacgaggccacaggcgaggtaaccgacgatctggagatattgtcagtactggaggctcgtgttatctgtattcaagagtcatcataccgccatgccataaacgtggcctgtgtccgtggcaaaggtcgtgacgaggcccacaataacacagaacatgtatgagatggcccaccatgagtagttaggatattcggttttcaaatcggcgatgatagatgcgatgagagcaataagccatgccagctagaactgtatgttagtcaatatcgggtcatagagaaagtcgaacgaacaattgaaatcgagacggtcatgagcgcgaacggatcgcctaggatgttgctaggccggaatttgcccattttggcggatttattggattgggcttgtgtaaagggaattgatatgagacgggcgaagaaaacgagggaatggcgatgagcgacgtgctttgtatataagagttgttgttgattgttgggtcctaaacgaggcggacgggaaggagtgactgtggttagttagtgtgggaacgacaggcgtgattgcatgggatgtggcaatgaattatgaatgcgacagtttataaaggaagcccgacatcatatggagtaggcagatataggattaaagtaccttgaaaccgaagtggattcagagacaatccgtggggatgaagaggttgggaaccgaaagaagggaccccttacagagaggcaaaaccagcaccaggctgggataaaatgaaagaaatgagagagggaatcaatgaagataaaagagtggataagattgaaggttgaaagagaggagagagaggagaatgatggaaaaggaggaaaagtggcagatacgctgtggagtccgggtcccccctggaaatcgacggtctcgattcttgaaattaaggaaattaagaaatttcaagggaacaagttgacttggcgggattataatcttataaggtacatgacaattaccttggtcgtttgaattactttatctcttttgattcatcgctaattataaaacaatgaaaatagacttgatctggtacaaatctataaatatccctaaatatcttagtcacctccgctttgtgcacggccatgctatgacttttatgactataattcgggacatctgaagtgtcagaaatatttcgtaagtccctatagaacattttcggtcttataggataacaactaacacattatacagcgacttcagttcgcaaggtggtcaagacgggtcagcctcatcttgtttttctgtgaagaattgcccggaccattttggtttctatactcatgaaatttcgaatactaactatactccgtacaagtacatacataccgagtccgcgttgatcgcatctgatcagcacgtgttagacatatggatgattatactatctaatctatacctacaccaaatctacagatgtctgcccgtagtacataacagataataagtatactgtaaggagtgtgttgttggtaccacactcgcgttcttttccgaatcgggacaaaccttaagaatgaataccaaatccgaaggatcataactatcaaataccaccctaaaagtcgcgagcttacgacaaattcttgctcagcctagatgaaccatggatcctagataaaatagagtccattgtatcaataaaaagtaggtttaaggtagaaaagaggcttagaagtttatccagggcccaggggacaaagcctaagactcttaagagttgctcgtgatccaaggctcattttgtcgttaagaagccacgtctgcataccttgaaaccatatctacacagtactgatggattatgttcctcgctcatgatcccacagatctattaagacagcagtatcgtcctcaggtcctagaattactgtttgctattatgccaattaaagaaggatgtagcctctggtagcggacaatatggtgagacaattgacaaattagagttctcttccgattagacacattagacgcaatttggaggccagcacaatgttattaatgccttgtaaagtctgaaaacaacatttgaagagcaaaaatagaataaaaaataagtgaggctgacccgtctcgaccagataaccttgcgaactggagtcgcacgcgctaccaattgcgccacagccccaagttggtgacatattttcgtgaagatttgccctatatttggcaccatgggagtcaaagatgtatctgactttttctcccccaaaagaaaaggaaaaaaggagaccgaccatagacattcacaacaatgataagtttgcagtatgcagtcaatagtgaataacaagagtagatgagtagatgagatatactccacaattattataaaaaaattggtactatagtgaaaaaaagaaaaaaaagaagatgaggctgacccgtctcgaccagataaccttgcgaactggagtcgcacgcgctaccaattgcgccacagccccaaattggtgacatatttgccgcgctgtggctttatgagcattggctctcttaactggatttaggcatgtatgattctgcgtatatacttcagcgctaatgacttgttcgtgttagccaaccaacgcacagcatcatatcattgatatacataggtaacccaatatcattgctaacaagtcaccagtcaatatacataccttttctgcatcaccaaccacagtttgcgggggaagaatccggggtagattatcacattccaattgaagtatggaatgaaggatatgatatacatgaacaagttttacatgtgatctaagctttacatatgccaactcggcttggccgagctggatatcatattccctcgtatccgcagatgtacttgaatatcaacgcacatacctatgtacgtgtgtgttgtagattgattaatccctctattttaaacttggaaatatcccatctgcgctattcaagctaaaagcacggtacgccaaaatcagaggtatcatagcaaaaagcagacaaccgaaacaaccagaggcatcacactcctccagctcctctccagaataacacccgaaacaagccatttcgacaagattcgcctctaaatttcctcctccctgccctgcctaacaacctctttcctcctaacctccctctcaacatcctcaagtctcccctcccattcagcccagcactccccactcccaacgagcccaacctcataccagcgctgcagcacgcgcgctgtgcgcacccgcagctccgagatctcagcagcctgctcactctgtgtctgcgcgagcctgtctaactgtggctgtaggtcgattagtgctgcggagctctgcgcgtccggcacggggaggtcatttagcgatgtaaggcgcgaggcggtttcggggaaggcggtggcgtaggagaggactattgaggctagggtttggtttgtgaggccttcggggatttggtgaggtggtgttgtttggaagagatctgggttgcggtcgtctaggtggtttgtgttagtatgaattggatggtttggagtggatatttcagaatccattatccaggtatcagaaatgcaattcaaatagcgagaagggtatgagatgaggggacggtgtagtggtgaagcgcgtgtaaataacattaacactggtcggtgacatacggagttgtagaacgtctcgtacggctgggacccttcgactaagccgttctaattctgattctagccgtacgagtcggcgggagactgtctcgtcgagagatgcgggcttttcgggcgtggtagggacgccggtccagtctgtggcgccggtgaggaggtaggcgaggcggcgtaggcgcgcctcgaggagttcgatggtggctccggccagtgcatcactttcgagggccatggcctatggaggtcaaagatcaatttggggaattgtgggaggaattaacagagaaagggtgcctgaagcttggtgaggtgcaaacatggcaaaatgtggggacaagcttatcagccgtagaaacctcctgaggtcgatgtagacttttttatgcaagactatgtctttttaatatgggtttcttcacacgagaccgatacttaggagttgaataggagttgagggtttattacaatctgatatttgacatatctcaagcttgacattgctctacagtatctacacattcatcactcactcattattcatgtgcttccttctccgcatgcttcattcaatctacttcgcatgcttaagatgatttgccatttcctcatcatcagcactgttccacgctaaatccacttgcgaggcagtgaacgccgtggagttatttgcagtggcaggatggcccaagagactcgctccatccttctcctgcatctcttggctgggctttggctcgtcgtcgaacgcggagacctcgtagtcaaaaacattcacctttgtggacttctctgacatttcaggctgctgttctttgggctgagtttccacgttgttcggctctgcccagggatcttcctggtcactaaagattatggtaggggtattctcgaattcgcccccataagcatcattgtccctgttcacgaagcccttttttcggttagccggggaccgcataacgatctgataacactagtgcatcttacctgaagctgtgacggcgcaggatccacttttgaattcactgcattctcgctcgcataaacaagtaagacagaactccactcttcacgagcggcttggaggacttcaatctcctgaactttccgaacagtgtagccaacaacctcgctatcctgtgtagctgcagtgttgccttgggcctttcgtttctcggcttgtcgtgtttttccatcttcccctgagaagctgatacgccaccactggtagtcattgttgttttcggtctccgagtccatatccatcaagtgtcccggagtagtcgttctaggacttgataaaacataagtcacatgcggttcagtgcatacacctcggagtgtatacttgtggaaaggaggctcggaaggtgatttgggaggttcgatgagtgtctttgatatctcacgaagagactccatggcactctgctttctaatttccagttctgtgctcatatgattagccaacagtatgagcacggcagaaacggctatcttcacctttgagtttagcttctatgttcgtagcgattgctctcaattcctctgcaactcgcattgtctctgcacctgccgctcctgaatcagactgatcagactcgcccacttgctcgggtgtaaccactggcaccgcctgggcagcttgttcgaggagttccgtgatcgtcgagttgcccacggggtcccgtggaattgtatagcgatgtatgagttgttcgagtttcaacacatctccctgtatctgttgtcgttttgcacggaattcacgggagagatctcggcagctgctaagataccgatctgggtagaacacagagtgaatatccacaccaacagcgtttggtttttgaagagcatcaagtctaatgactagcacgtctgctaagtgttcaagccatgtgtcatcaaattccttccccggtctgtcagaccataaagctgaatccaaaacgtcatagagcgtttgatcattgtcctgctcaacaggaggctcaaaagtgaagagttccctggtgatgggctcaacaaactcgtcgaaagtttctctcttgtatgcataggtcgtgaatatggttgtcagtggattttcaggatctgcctggatggctgcaccatgccacgcttccaaaaacctggtgacaatctcctccgaatcagccgataaggatgacatgctattgatttttgctaagctgtcgctgctgccaaaagcacgtttcgtggtatccataaaagccatcaagcgctgggtctcatgaatgatatcgtcccagtcgctatccccggtcttaccatcattcaccgtgacaatcttcggcaggttaattggttgcccgttccaccactgcggctcatggccgtagtcaaacagtggtttattccgtaagagcaatgcttctcgcgcgaggggaatactgtggagaatcgtcaagagtcctcctaggtaaaggccgtcggtgttggggcggatgaacgcaggctcgccctcgactcttttgcggtcttccggatctgggctaatcatgacttcttcggaggatgtgttgaatagggtcatcgcccaagcaccttcctcgtagtgatcccgagttgctttgttgaactgcggctgtctatgcgacgtcaccccggtttcctgctgccccatgtccgaatttaatgacatagcaactgcctgctgtaattctttttcttcgcgttctgccagactgagcccatgtccggaaccttctatatggtcaagtaaccgcaaattagtacacttcttgcagttgaagcgtgaagactgtgatacctttcggagcgatcgcgacagaatcttgatacccagcgttttgttccgagtcacgtatatctactctggaaggaggacgagtgggcggtgccgtcggtggcattggtggcgcattgtcttgttgagcaaaatcccatgctgaggcggggtatgttaattcccagtccgaagtcgcataagggaggttatcttacaagagcctccgttatcattccagtaactagttattggcttggcggtgtcagatcatagccaggagttgctgcgcgtcgccaagtttacctgtagctgagaccctgtcggatcttcgaagtacgcgttgatcgctttctgtgagtcgagattgtttgcctgtacgcgatagaattagctcgattttacttatcatcccgatggcagtcctctaccttcaagaaggcgatggcttgctcgcgtgtggtgcttgtgaagctgacgaagctggtgatagcttcctcggtcggttcggaggccatgttgttgttgtctagttctgcgctgaagctagacaccgatagaataatgaataagcatgagagggacacaaaaagcaaatagaacaaagcaaatggggacagaagagttggggaagagaaagacaaagtgtcgcaactgagcttccccaccacatgacgccaagcatcattccgctatttgcgtctctttgtacttctccttgtcctccctctgcctcgattcttcacttctttgagcctaaaatatacaggattggacattctcgaacatttcttgcattccatagcctgttccaggtttatcaaggcccatcggtcggactagttcacgttcacaatggatatatatatttttctggaactgattgtctccctttcaagtctttgaacggcctactctgggtcttacaccacaatactatttatggttgaaacaaaacaatgcattagtacaatagctcttgggctgtcggtccgagtggatataaaaacccctctattccgcgccagataatcattcattacactttaaacaacacatcatctttcactttcacaagctctcgaattttctcatactatatagttacaatggcctacgtaccccaaatcacaaataagaaagccaagaaggtcaagacagtcaatacccccaataccaccattaagaagaccaccaataggaagactgccaggaagagcgccaataggaagaccaccaaaaaggctcccaatcctcctgttgatcttaacaagcttttcccatcctggggctctgaagacgcactgaaccagacggcaaataaggaagctactgatatcattctagccgtgtaccatgacatcaatgcctactgcaacctcgagagacatgcgagaaacaaagtttacggttctcaagagacgttctacaacctgcttgtcttcacagaaggctttgtggagcgggaaatcggctactacacgtcctgcgtggaatcattcaaggcggaacacggtgagttccaacctgtcacacctaatagtagattcttagaattcgttactgggctcgggtggaagatgtttgctatcttttcccatgccgaagcattccgacggggtatcaaagaagccgacgataggacctgggggctcctgctcgagaagatccacgaaaactccatgagtattgaactttatgcgcacagtcgtaccctgaagtggcgtaatattcttcaggtctaccaggacaaccccatcccaggcctgccagatatgaaacccgaaatcgagacatacatgggatggaaagtcgaccaccctcatcacacggtcatcacgcttgatggcaagctaaaggaacccacatacaatggcaagttacagcaacacatcaacgagagtatctatgatcccaagaagtggagtggtcagaaacaggacccgacacttcgcaagaagcccaatggcagttcaaccaacgtcggacgcaactgtgttctatgcggtagccctgtttcttgtgactgccgcttgaaatctcgggcaggagaactggttgagcttagagaatacaccgagaagggtactggtgtccgagcgctggcgagattcgggcgcggtgatattctcgatatcttcatgggtgagctccttccccaccccgcagaggatgtttatcctctaacacaaagcgacgacaaattgaagttctccaatctgtgtacaatttgccctcaccagtttggcaactggactcgttatatcagccactcgtgccggccctcgacgcaattcatgactcgcaccattggaaaacgagttgtgtgcacggttgaagccattcgcgatattctgccattcgaagagattactgttagctatggcaataagtactgggagtctgtcggctataactgcctatgcggacactgcgatggttctgggactgactagaaatagattagccaactatatattctgcatcttagagttgagagctgattttaatagcaaagcattgaatagacccttgatttattttatttcaacgtattaatgtaggacacatgtagtgtccactctagtaccaaggtgatagggtgatgtagttcctcgggtatccccgcagttctgggggtgcggggaaagctatactttccgcggacttactccgccttttgcgtccttttctccctgctgttctaaatcccttcatttggagaagttgactactacctatcgcattgccctacacgactgatacagtcaatttcagccctcaagtagtcatgaaatcttggccaagctaacattggaataaaacatgagctacagcggaattatcacggggctgagccggagaggctgtacatcctgtcggaagtgtgtgcttggaggaaagagtgtccttcagcaagcatccttggtcaagagaggactgctgacggagagctatgcgcgggggccatcaggtgtaagtattctctatctaagaacaaggaaataacagtatttatctgaccgtattgctttcgatatagccgcccttgattgagtccacagttggggaccatttcgccaagattgtcgcggaatgcggagatagaacagcgtgagaaccgggacgcaaaattggagaattaagactggaaatattaactatactgtccagtgttatctcgagacaccaaaaagatcgagctacgtatgcctccttggacacaagaagcaatgccctcgcccgggggctggaatcactgggcgttgtgaagggggagcgggttggagtcatgcttgggaactcgattgaatacgctgtggtacgttgcgtgtccctaaaaatggttgagaagagaagaacaaggcttacatccgtgagcaggcaacatatgcgttattcaaacttggcgccgtcttggtaagtcagtccgctcattgtagtaagcgacattgtatctaatcatttgataggttccgctcaatccgtctttcaatactgcacaagtgattgcggccctaggtcacctaggatccggtcatcttctaatcagtacagagtccaacctgccccgaaaacaaccgcgcagtaatgttcccttgctcaacgacattgttgaagacctccacaagtcaaacctggagtccgcattggtcccttctctgaagaacatcattatggtcgataactctgaaggccgcgtggatatatcttcctataaaagcttgacgccgtatgcatctattgtgtcccagcttactgcagacggccgcccacttcctccccagaatctctcgccggatgaaactgtgaatatccagttcacgtcaggaaccacatcaatgcccaaggcagcatgccttacccatcgctcaattctaaataatggctctcagattggcgatcgcatgcttctcacgccgaatgatattgtctgttgcccaccaccgctgttccattgcttcggcggtatattaggctatatggcaacagcaacccacggctcagccatcgtcttccccagtgaatctttcaatgctcgggctgcactagaagctgttcaagaggagaaatgcaccgcgctgcacggtgtaccgacaatgttcctcgaggagttgagcatgatcgagatgggagaaatctccaaggagggattccagtatcttcgcacgggaatcgctgctggaagcagtattccttccgagatcatgaaaaaactacacaaggtattgaacctgaccgaattgacgatttgttatggaatgacggaaacaagccccgtctcggctatgacaacgacggatgatcccatcgataagcggatctactctgtcggaaaactcatgccacatgtcgaggcaaagattgtggaaccgatggacaagaaagagattctccccatagagacacggggtgagttggcagtaagcgggtacctgctgatgaaggaatactgggatgatccagaaaagaccgcgcaggtgatgataccagatgagtctggaaagttgtggatgcatgtgagtctaatcatctattatttgtctcaagtaatgcgaatttctctgaactgtgcttttagactggagatgaagcttccatgtcatcggatggatatatcactatcaccggacggatcaaagatctgattatccgcggtggcgagaatatacaccccctagagatcgagaattgcttgctagccaacgatagcgttgcagatgtgtctgtcgttggcgtccccgacgcgagatatggcgaggcagtggctgccttcgttattcctcgggaccacggcttaaaaacagtcactgctgaggatattcagcaatgggtacgtgagaagcttagcaaccatcttagtaagttataacccagaccttgggactgctgcatcctttccatcgtttgcagctggtcttcggtcatcctcaaaattgccatatagaccgagctgatgttttacttgcgtatagttccgaagtatgtcttctttttgggccctttggaacctttccctaagacagcaagtggaaaaatccaaaagttcaagctcagggagaaggccattgcacttttgactaagagcgctgcataaatagcgagcatacaaggccgaggcctgactttgcatagattctaatggatgagtgcctgatttctgtacatacttagttattcaagccttattagatagaattgtcgtatgatcaaggttaaattaagagcctgaatagatacattcatactgttgccagattaagattcaaagtagagtgttcgctctgaagtgaaccctggatcatcagaaatggacaacagacaagtaccaagtgcaagagccagtagttgaagcataaacctagaaatgttctcatggcaacatagagttttccgcgatggtgtcggtgtgagtacctgctttctttcaggatatcaagtcgtggtagccagtggccatcgcggacactttcagacctgccacatcttaatgacgaacacgaagctgtcgatggggtaggtagctcgaaagcagtatcaaatccctcttctgtggctttcaagggcgggtcgtttcagagatagcgcagtgatgtcagtcagaccagcacgagtaacatgtataacatatcatgtagccagtgagcaagcttgctgtagcacacatctccagggcacgtgcaacgaggtttctctaaatctagaaatcctgaatgcctgtttctccctggagatttgggcgagcgccgtcctcgcaagtgccgtcaaccacccattcaggctcctcatcctcgaaatactggtcttgctcatccgagtgatcatcatagtcgtcattttgatcaacggtctcgtaatcgaaatcagagtcattaccctgcatgaaacgcaatcccatctcccagcgccagagccgctcgccttcctccttatttgggggtatttcatcacggtcctcagcaaggatctccccatctgggccgcgagtataggtcatcatagcgttagggtctgggtttgatatcgcgtccatcttggcttcagatcgcaggagatcagtctccaggacgcctgaaaaccccttggctcgcccctcggcctctctttcttgtgctgtctggaaccggcggatgaggcgatcgtataataacgggtctgcggagaagtcgattaggattagcattgtgttttcttgttcgctcctgtatgcaaagccagctggcaccagtaataaaccaggccagataatttgtaaaatgattaactggcaatgggagagaagagatcaggcggaccggctagctcaagccccgccgagaagtattctgggtgcaagtccagataccgcttgcgacggtttttgactgtgacagctttttgtgcgctagacgcatctttggccgtaaacccagaatccttggggaaatgtggcatctttggtgtgtttcagagtgtggagatggataggagaggagaatggaagttgggaacgcggagctcagcggcaaaagtgccttcacctccgcaataacttttttctcgttgaagaatattttgagatgtatctgctttgaacgtgtaagttggggatctcattcaaaataccttttcattattctatggatgtttttttggcaataagggggaaaggacacagtttcaggttgctaacaagcctgcagatgcgctttctaggttgatttcccgtatatccagaactgcatcagctggaaataatgtccccccaggacatgttgcggcacattgatgcccggcggttcactaccggtgtggttttgctgatcctgcttgccttctactcgcccctttcgaagcttgtcttgtctccaacatatggatccttccccgcgcatatcttccataattttggagtggccatctccggcggaatcgggtggctactgaaggacaagattctcaagcgcatgggccgtctaggtggctttatgctccctgtgttggcattctgggttccgactctccagtactttatcaagcagcaaagctctaagattggcaaccccacaggcccagtggtcacagaactttgtggttactaccctctggtgctgttgaccgtcgcctatgccggaaagcaaatccagactgctttgagactcgaagcgcagggcgacgtgatagttgagcatgtgcccctgataggtacatatatattctattcggctggcgaccacattgcccaatatgttctttcatggattgttgggacctcggttattttcaccagagttggcatgcaaatgcttctcgcggcctgttactctgtgctcatcccatcaaaatggctagtcctggccattccctctatcattttctcagtgacttcgaacgtacatttcgctggaattagtggtgtcaattccgcgattgagcacgaaggttattctcttttggcacgacaggaagcttacactgggtacatttctgttttggaaaaccacaatgaaggattccgagttatgcgctgtgaccacagtctgcttggtggacagtggaccaagctggcaccaggctaccgacctgaggtggatgaccctatctacgcagtctttgccatgctcgaggctgtccgtctggttgagccggataatggcgtttcccgcgttgacgcagacagcaaggcgttagtcatgtaagaattatgcaaaaaggatcgatcgcccagtttactgacagaaaatagcggtcttggagtcggcacaacaccctctgcgctcatcaaacacggcattgaaactaccatcgtcgaaatcgaccctgtggtgcacaagttcgccactcaatatttcaacctcccgccaaaccacatctccgtgattgaagatgccgtaaaattcgtcaagaaggcacagtcctccccgaatacaccccaatatgactacatcgtccatgatgtattcactggaggcgccgagcccgccgatctcttcacatacgagttcctgtcaggccttcactcgctcctcaaggaagacggtgccattgccattgtgagtttcatcaaggcaacaagccccccaaatcaactccagactaatgaatggaacacagaactacgccggtgatgtggccctctacccaaccggtctcgtcgtccgcaccatcaatgccgttttcccatcttgccgcatcttccgcgaagaacccactggagatgacgaagataccgacttcaccaacctggtccttttctgcaagaagagctctaacacaccgattcaattccgtgaccctgtcccggctgacttcctgcgcagcaagtctcgtgaaagctaccttgttcccaagcacgaactcgaccctgccatctttgcctcttggcccaagggcggtagaccaattttgattgctaagcaggccggaagattgcacaagtaccaggatcgcagtgcgatcaagcactggtctatcatgcgcaaggttatgcctgatgccgtgtgggagaactggtgagtgttgaaagggagctgagtaaaattcgaagatcgaatattactcttgctctgacttttatattgtctgtctatattagaagatcataggtaccaaataatagcaaactagcctacaaaaacatcgccttttagatctactgaaaggtacatacttgctgtttcgtccttcgtattgctggaaagacacgtagaataacaaatcacagacttcatattggtatcattatctaacacctgccgacaagccagggagctccatccactgttagagtaagcaacagagcaactgtctccccttcacaaattcaaaggtcccccaagagctctttcatctccatatatcaaaccacccagcccatcaccaacagtgagagttccggcctctgtattatgtacgcacaaagaactaaaatacagtgagaaagaataaatcaagccgaaggactgccacggggactggagccaggtttcttgacgaggccggcgaagaagttcgccagggcttggttgtgcgctttctcgtcattgccagcggtgcctgcatatgggctctctttctttagggttcgactagcctcgcggtcctggggtaaaatttagctatgtcctgggttggggtgatgatgccgcgctggacgggtgcttacccgaagctttttcaacatatcatcggcgtccacttggattccgcccatgttgaactgtacagggccgatgtggtcgttgactttgccttcgtcggccatgggagacatctccagttgcggggttggctggtttgaattctccttctcatccttggctttgagatcctccagtttctccacttgggttgcgaagaattcttggaggtcggtggtctcgacttcgatcttggtcgtgttgccgtgggggttggatgtgcctcgtttagggtcattgatggtcagttcgaacatggtcactgcacttgtgccttcttctgctacgccgttctcgccctgctggttgtcgtctgtggattggtagattgactcgggagactcctgaatctcaattgaccacgccgtcgatactccctccatgtcaaatccttcccgaataattcggatcttaccccatgagtcccagttggctggcactagaatcttgtctcggtcgatcacattatgctttaatgattctcttttcaaaagagagtgtatacccagagaagaatgaatcaagccctgaagagagtttgcaaggaatggggtagtatagatgagcgacgcgccgtctgtctagaggtcagaaagagcacaaatggccaaacacaggataataacatccttacgcttcaagagaatcgttctgaggaattggagaacgaaatcgaactgctcttcgtgccatccgtgatctttctctaatttctcgattttatccgcctgagaacgtcgcgaagtaaagtcagcaaagatttaccagcaattgatctctggataagagtttacataccccttggcagacaacacacattgggattccgaggccctcatcccattcaccgggtcctagaggtattgtgaccggaccgcttgaggttgaaatgccgcctgcagccgcagagctgggatcaattccccttttgcgatcgcgccattccgtcatggtctcttccataacgaatttggtttcatcgtcaagcgaaacgagcacagaacgtagcagacgggtccattctcttagcctgcgaacccacgtccatgggtctgaccagtccatcagaatgacaaccagcgtttccgggacggacttgggggtcaaaagtggtttgaggagaggtgcgaatgacggagagggctcggacaagaggtacgccgagacgcgtgccagggtatctgcgcgagagaagcatcagcatatgcctgatcaaagagtgcattctccgtgtaccttctttatcagcatcgaggacatctcgatatgtgtatccaagcgcaaattgattggcaattggtggtgttttccctttacctttccgcttgtcgtttactaagctagggtctgcagaggtgtccgcggaaaaagtatctagaaattccctctggctgtccggcgtgccacctatgatcgagctattagcgacgggtccaagatgaaagacgagactagaaatgaagatgagcggcactggaaagctcggatgaactggtactaacctagcactagcaagttcttctcgggtaagcgcttgccgttggcaacagtatctaatagagaggaccaaatgttcttcttggagccatctttgctggttggccgactgctcgtcttcccgggattcggactggaaggcatcgtgtcaagtcccaccgtgcctcaaagggcattcacccttccaaatgtctgtctctaccgtagtacagcggaaatattgttcgcgtggaaatgtggaggcggagggcttgtaaggcgaagcagcgttgcgggtcaggggaatcccgagggagatggataaatgtaggcccaagtgaaacaaccctaatcgcgaagggatctccgattgcaagtcacaaaaaaagaggaaggtctttttctggcacgtcgttgagcagggggctagtttgcattgtaaaggtgcgtctccgtaaacaattgattattacggttcagcgcgggctccacatttctttctctccaacttctgccacaccttgaactattctcccgcgcacatttccctccatgaattctattcgccaggtccaggcgctcaataagcgcgagcttgagcacgcgatgtaagtagaactcatgtgaagctcccgcaaagctctttttcccactgacagtcttacgttccacctatagacccccagaggcatcatggcatgcagattatcgcgacacagcctatatctacatcggaggacttccatttgatctatccgaaggtgacataattgcgattttctcacagtatggggaaccggtgcatgtcaacctagtccgcgacaaggaaacaggcaagagcaagggatttgcctttctgaaatatgaggaccagcgcagcacagatcttgctgtggataacctcggtggcgcaactgtcatgggccgtttgcttcgagtggatcatgcgcgctacaagcggaaggacgacgaggaagagcaggacaatgtcgccaagctaatgggagatcccggcgtcagtgagaacaagagcaaggaggacgaccggaggaggggaaccgcaatagaagagaggcgacctatgctgaaagaggaaagggaactggaagaattgattcggaaccacgacgaggaagacccgatgaaggaattcctcattgaggagaagaaagaagagatcgccactgcaatccagctgtggaacagcaccaagaagtcgtctcgacgacgcgatgacagcagagaacgatcaagccggcatcaccgccgacaccgttctcgttctcctcgcgagcgaagacatagagatgatcgctctatggatagggagcggcgatctcgccgtaggtcatccgaaagaggagaaaaatctaaaagggaccgctcgccgaggaaatcgcgctcgcccgaaccccgaagacaccggagtgatcgggatagacatgatcgccgccattgaaagataaatgagaaatcgttataaaggtttccaacgttatctacggtgctacacatatttctcgccgaaattctctccttgcaaattgggacaccctgaccaaataagagcgtttcccagtccagaaagcgatgccatgattcaagcttgatgctggcaaagagctaggtgctgcagacaaggtgttcgttacttgctggacgatagactacacccttggtgtgacagaccggggattttccttttgtcaacccagataccttttccagccatcccgcagacaatacctctttccttcctcgccatctcgaagcacaaatttctcccagcgcccttcttttccagatccgactaccaacagagtctggtcatcgcaccagcctatgaggcctttttgaggccgaccaaatgatgacccgatcggtggcacatgcgccgagccctggttggcttgctcaccaatctcaaaatgtgcgttggcaaatgaataaacatccgagaacacacgaggaagcaggggaatcttgccaaggattccccatttgtagctaggaggtgtttcctctaatgctggtgatggtgattgactgcgacgagtaacggattgctggtgggggatatcaaagatgtggagagtcgatttgtcagatgtaactgccagcaaagtattggacggcgaaaaggcaattgagaatatcactgcgtggtcaacaccgcgtcgcaattctgctagcttcgtgcaatttcctgtagcgaatatacgaaccaaagtcccctggatagatgttaataacccacccatagatgatcgcagcctaagataacttacggactcacttgcagtcgccagcaagttcccatcgggacttagggccatagcccgcaatggtgtgctatgtgcaggtatgatgctgatgttgccggtctccagctctatcatttggacctggccgggagaccgaccagggaaggccagcaccttgttatcgagacaggctagccccaaagggttatcggaggtttcaaagactgagagtttctggggagggttggagaatgcaaagacatggacgctgttcaataaaacagcgacgatttttgttttggagagacggacaccgagcacggaggtgcggaattcaagtgtgatggcggctttctgtttggcatcgtcccatataaccaactggggatatctgtgagcttagatgctcacattatgctagggataattgcctaccttattctgtgggaacttggggttctttccaccaccgacaatggccaagtagttcgactgaccaagcatttccgctatcccgatgcctgcgttgaagtcttaagtgcaaataagcgagtcaaggtaagtgacttgatattttgtatattcacaacgtgtagatcaatcgcttacctctcaaaaccttgagctcgcaagggttggcgttatatactgttcgggtcgttcatcagcctgggttccatagttcataatatgagctagcttctccctaggttctcctaatagctagatcaagcgttcctcaccacaaaaacccgtgtccaagcccactgagaagcagctgttatcatgattaaatgttgctgagagtgaatatggcccggtggactcatcgatagattggcgggtattcattgctgtatgtcaacgaagcataggaaataatttcttgatcagatagatcgatctgggtagactctgtatagtaaagtcctcaatcggtaataaatagttgatcttaagaatttttccaggttcaaagcttcaaatgcttggatgtctgagatcatccccgagcttcttaatcgataagagcaatgcgggcaagatccacatcgacgcctcaggctgtggattatgtaatcatacggttgccagcagagacccactttgatcaacccctgagttgctgttcgatgtgttgctgatgggaatgaaggcgatgttgtaaatggaaatagggggaatactcggtagataattgtcaatttcctgaattcttttttttcttttttcatccactcatcaattgtgactgatcgaaagctttgtagaagtaaaaagtagctggagaagaagagctgtcccgtgattggccacctatttgggaaagggggaaacacgaactgtctttcctccccccccctactctctccagactctcaggagaggcaagtttcaaacccttcgtcttcgttgttaattccttgctttggacttctttctcccgctacacttctttaatcttccctttactcacaatgtcgtcagccctcaatgcggtatgtacattccccttttattgggagcttcccgccttctcttaaagcttcccaagctaattgcatgcccgtacttgttccgggtagatcaagattcgtcgcaagaagaatgtcaagaagggtattcaattctgtttgatggtgtgcggcgccagtggaacaggtatgcttacaacggattactcgaatttcagggactaaccggatcctcttttccgcgacaggtcgcacaacttttgtcaacactctctgcggcaagcaggtcctagagggcaaggatgccgatgatgctgccaatgctcaccttgaggaaggtgtacgcatcaagcccgtgacggtcggtcagttgaaattgtcccccgcgcacggcgcttatatcaagctatcaatactgataccggatggcagagctcgagttggacgaggaaggaacccgcatctccctgaccatcgtcgatacccccggattcggtgaccagattgacaacgaggctaggcatgcacacacagatacccgacagatgttcatggactgacttttggatagcttcggcgaaattgtcggttaccttgagcgccaatacgatgatattcttgcagaggagtcgcgaattaagcgtaaccctcgattcagggataaccgagtacacgttctgctctacttcatcacacccaccggccacggtctgcgtgaactcgatatcgaattgatgaagcgcctgtctccccgtgttaacgtcattcctgtcattggaaaggccgactcgctcacccccgccgaattggccgagtccaagaagctgatcatggaggacatcgaacactaccgcattcccgtctacaacttcccctacgacgtcgaggaggatgacgaggacactgtggaggagaacgccgagctccgtggactgatgcccttcgctatagtcggatcggaagactttgttgagattgacaaccggaaagtgcgcgcgcgccagtacccatggggtgtcgttgaggttgagaaccctcgccactcagacttcctggctgtccgtagcgctctgctccacagccacttggctgatttgaaggagatcacgcacgacttcctctatgagaactaccgtactgagaagctcagcaagagcgtcgatggtggctctgggtatgtttctccttatactagaaattttattataatccatcggctaacaaatgaacgaacagtggctatgattctgctatgaaccccgaggatcttgcctcccagtctcaccgtctcaaggaagagcagctccgccgcgaggaggagaagctccgtgagattgagatcaaggtacagcgtgagattgccgagaagcgacaggagttgttggctcgcgagagccagctccgagagatcgaggctcgcatgcagcgcgagcagcaaagccagaacaatgccagcgaagcagccaacggagaggcctagatataccctgtcgacgatgcggctcattcgacggggcgccggttcgcaatgtgatactctaccagcatggacttttatggcaccaacaagttggcttttgtttatgggataatattgactgtttattcatgttaatggcttttttcttcttttcttcttacctctgcggggatgggcaacctcaactagattacggcactccagtcacgaattgtgggcgcaatgcttctcatttccaatgggagtctgaactatgtcgagttgggaatggttcttaccagttcctggaaaccctatgctcgatatatctcctcgcattcaatctggtgactgcctcttctctagcacatgttttccgccgtgtctaggtcgtcccatcttttttttcatttcatcacatcccagccgccaccgtgccatgttgccgcgtcatttctatttcctcctcttctgcttcctctcctgttcttgtccaaagtcgcagcgcagcaatattccctcttctcttgtttttttttcgcgttcgtgacttcttgttcattatctatttttttctcctcgcctgtcttcctaccccgatagtaattgaggaagaaaaagtacctggctagctcgcttgctctcaatttcttgttcagctactgtagccggtcactgcgtactatctgtagcagcatgctttagtttgtgatattacagctaagccgtcaaagtatttacatagcttgaagatagtatgttaggcttgcttgacccttctgtggcgacaggagatgtccagtttagggcctcactagcaaggcggttaagctctgcatagttaatcatttgaagatctggtcataccatggacggattaatgtgagccaatcataaagctcccaacaactagcaaataggtatgggggcggtaagacggctatatagtattgaggcttgaaatttcgttgctttgtgtggattattttcattatgactaggataggaaagttgtaaaacgaccgtgaaacaagatcaaatatccatgattggaattaatcacattataataccaagcttaggtctactgcaattatcctcatctgaaatgcaatagtgccattcacatcaatgagattgttaagtataacagacaaagatgcctcaaacccaaaacgatacaagtagaacgaagatgtcttaaagaacatttggaaggaaacaaagagagccatcgggagatagaaagagctaaagaagaaaggtaaaaaattttagaaagaagaaaaaaaaggagccaatgcaatagcaagaactgaaaagaaaagaaacgcagcaaaaagcaagaaagcagacacgcaagaagtggtatttgcgctccattgtacattgcgtagaaaagacggggaaacccccatttgttgtaattggtgttgaggaaagggagagataggtgtttgcgaagtagatgtggatgatcggtcagttgcagagacaacacagtacatacagccacggctttgcgagtatgatgagatgacacatgtagtgaaggacgggtgtcattaagaactttcggaagataagtgcttaatgatctgtggaaagagatgcgggcgacaacgtcaaagcggcgatgtcaagcaggggctgattgtggtatgtacccgttgaacattaggcggcggctggctgcggcttgttcgtccagaaatctaaactggcaacagtgtcatagcctcggtcatcttcataggcgtagataatctaccagatttagtcagcgcttgatcagtgaaaaagaactcccagagaaaaaccccgggaagaaaaatatggaagtaacatacctcgcgggtggaactgtgtaacatgcgaatgttcttgccggtcataaggtgtgtcaattcacttgtttcaacgtgtcgaatttcgacaaagttaggttcgaacgccagaatgtaagggtaggacagtgcgaatgcgttcgggttgccctcccaggcgatcttccagtccggacgagctcgccacccattgcggttgacgaagaatgagaaatcactgtagttgagtaggaactcgccattcatacgctcaatatgaataggtttgacattctcctttcgtgccacgaagtcaagagacgtgtcggcctggtcaaggagagattgggtctctgttgtttctagactgaccacctcaaagccacgtgcacaaccaacacatagagtagaacgcaggaagtggatggaagaagactcggcagggatatagtattccttagtgaaagtgttagtgcgaagtgaagcatgaacatggaagagagaaatacgaaccttgaatggcttgagagtatcctgaccaccctggaacattttgctgacagcagacttcttctttccctttgccagattgtccatcggctcgtagaccttgattgtacttgatagcgccgatgttttgactgaacaaacaagatgacgacccagaccaatgcctgccttgaaaaagttcgcatggccctgaattttcttcggccgttttgccatgctgttctggccctcgacataatcgagagcatccatgggataagaggaaagcgttttgtttgccagaaccaatagcagctggtactcttctaaagtgtctatttgagtgacttgcgtagcctctagaacctttcttggtttggctgttttgtctttaggccagcgttctgagacaaatatgccattatcagtcccgtagactaacttccggcctccatctggtggcagttagtgagtgacacgagttgaattagaacttttttgacgtaccaatcggaacaagacaattgattcggttgaccgctgcgaaaaagccctcgctcaggatcgtcttgttgtagaaattgctgttccgctcccacagtttgtgttgttgctgttctaccgcttcgataaactttcgtcgcgtggcgacgtttgtggcatagagagtctgctcgtaaccacccttgccgagatgcctgaaagtgataggcagtccaccatctttggcaggagggggattgttgatgacagtcttgtttgacaggagactggatgaaggtcttttggcaatccctagtcgtgggatgacctcttccatctgagcgattactaacagttctaaaggaatgggcttcctataaactcgagattcctcgcgtttattcaccattttgacgcgaacgagcaggacggcatgatcaaagagatacgcggtaacatcggagctgtcggctgtggttttcttaaatgacatcttcatgagcatttgtcgattttcttctgtgagcttcaaatcaacatagtccgcagagttgaacttcagcgcagcgttcaattggaccaaattgaaatggttctccgcttttccactttcagtattgacgcgcgaaaggaagtccttgatcagcttgatggccttcggaatatcttctttgtcggggttgccatccgcactgtttttgtaaacaccttcaagcaaaagcgggtatcttgcaagacgagttgtaggcttcgtcaaataaccgttcagttccagcttccgggattccttgagacgttccgtgtcttcgacaaatttcgcaaaggctgggttcgatgatttctccttctcaaactcatactttccgtatagttggttggcaccatatttgatgaaagggtcgaaattagggacatgttgacagaagatgtcgccaatggtgtgaacgacctggctctccttctgtcgagcattcagggcttcacatagagcgctgttgaccttgaggacctctaagcagttgccaaacacggttcgaataaacttctcacgccggtgttctggaattggcgagtgagtggtagttccagcagcgcgcaatggtcgcatccagaaatcccgcaaatattctaaatccttgacgaaatcacgctcggtgtacatgagctcaaagataacctcctgccttttcttctcgtggtcatcaaccgagtccgagacctccttgggcaccgtactaatccacagcttttggttatcattgtcgtcatcatcatccgggggtagagcagtcttggattccgatgttcccagtaccggctgaggtttcagattcaacctggcttgctgctccagtcgtcgcggacaagcaatagaatagcagagagtgtcccggttgcaagtgggagaataacattcagtcaggagagtgaaaactccgttaacctcgatcgtcgacttgtcttctcccattgtttccttgaactgatagacctctccgggtgcgtcgcgaagacggtggtcatatgtgacatcgtggaagaatttctgagcatccagcgcacggccgagcaagagagcgaggttgcgatcattggttctgataatagaagctatcaagtccaccgaatcagtacccgaaaacgcattttgatacgaaaggccgttcttctgtcgttcgccgagtgaaatcttctccctgaaaatctcagcaacaagagaaagcagagcaggatataccaccggaacctttcgctgcgaatccctagaaactagggtaaccttgccgccggagccctgtgtggcttggctttgaacgctcattgtccgatcgggcgcaacagtggatgccatagacatagtccgagatctctgcgatccatcgcttggctgacgagatgcaacaaattcatcgggactgggctgcatcgagtcatgccttattggaatctgctgatcgtgacttgacggaggtctgcggtgtggaattgaccttccgctgttcatgatatgcggatcccgatcagatgaccaggaagtcatagacatagctcgttcgttcccatgcttttctgggacaggacggccgagctgcgtgacctgagctccagcatgatactgttcacgacgagaagcagtggcagacgtgtgattgaagttgcttggcggaatctggtaaggcggcccgcttagttttgccattgaccttgaccgggatgaatcggaattcagcgcgggaggaggcatagcacgattgaaatccctagagtctaggtattgcggagcagggctcggtcttgactcgaggcgttgaggtcgaggataggcagcaaagcgttgttgggtgctagggttgtgtcgaggaggctgatgtgaagacattgttgccgaggcccctggactgtaggcctgatacagcccggacggctggggtggaggatatccatttggtggtgccgacggcggtccgtgtccatttggcatttgccgtgttggcggcggcggcggtctctgaaattggggttgtgcgacatgcgatgacatggtgtgagcgcgaccctgggcgaattgcggagtctgtgaattcattgtatgggaccgtcctgcaggcggtgcgcctccaaatatgtcagaatacgctgcatcccgctgcgtagacgaggcgggtccgtgaggccggtaattccggctacgctggccccccaaatccgccattttcgcgaaatatcagcgatcaaggatgagtggcggttgtttaatcagatacgcaaggtatatctatgccggggtgcgaagaaggcgaaaggggtatccgggttgatcgtggagagcgttcagggcgtcgcaataggtctgttcaagatcgtagaccacgggagaaacgatagaggtggaacgggagagaaaatttccgtaggcaataacctcgaaagaaataatagattgtctcaaagcactgatgggactcaatattccataactcccctcagttcggatggggaattcaaaggcgatatcaaagcggtactaatggaaaagcgccaggagccgtgagcgcaactaagtcagggctcctttcgatttcatgccctcagcatcctccgagatttgaggtcaggagtgagagtagaggagttgttgaaggtgggggtgataattggatgttgaaaatgcagtaataaactgggggagggggggggagggacccaggagaacgaggatggcgaaggtgacggcgaggccggtatggtaatttcagtacacagactcctaatctgccgttcatagggcttttaggagtgacatctgaaatacagtgggtatggtatcgtcaccgcccatgaccagacaatggcgtggactacggcgggcgaagtggccatgtggaacacccaaaaccccgacacctccagccgtcaacagcccgaacttctccctgcgcttgatcttgtatcaaacaggacccattttcttcttatatttcccccgtgtaatttgcaagattagtcttgccccaccatcactatggcagacagcgagcttgcgcccaagtttgctccgttcttctccttcgtgagttcaaggttccgcgaccactggggttcatagactaacaggcttcctatactaggcaggcattgccgctgcagtgggttcattccaacctggttccgactagacaatacactaacagttccctatagatgatcttcggttgtacgtgaaatacctctcatggatggagctagctctccaaggatataacgatgaaggcattggcagtcgctggggcggttaagaacctccttaaggacgtcagggaagtccttacacttataatggatagcatatcatcgctagagaaatcgtggtaccgtgagaggccacagtgggctatgaaccggttacaatggttcttatcggtgcagtggttcccatggggcctgttgcaacacttgagggccctcttacggtactgcgatatctctggcgatgacaatgacatcatttataagcgtaaggacttccttgacgtccttaagggggttcttaaacgcgccggcgactgccgatgccttcagttatatctatgttctaggtatttggacaaacagcttacaatctcacagcggcaggagcagcttatggcacagcgaagtctggcattggaattgcaggtgtgggaacctacagggccgatctcatcatgaaggtaagaaccgtttctctaggttccgtgatggacaggacggtagctaactgagttcatgactgcagtccctcattcccgttgttatgtccggtatcattgcagtttacggtctcgttatcgccgtccttatcgctggagcaatgggaccaggaagcaatgagagcttgtacacgtacgtttcgaaagttgggtggatgtggagcttggcacaagctaatgatgcacagaggcttcatgcatcttgccgctggaatgtcagttggtcttacgggtgtggcggctggttatacaattggagttgtgggcgatgcagtaaggaccctatatgcgcggcaacgtgagaggactattaagtcctaacaactactctagggtgttcgggcatacatgcagcagtctcgggtctacgtgggaatgattctcatactgattttcggcgaagttcttgggctttatgggtatgtttctgagtcggggttctttcagattacctttactaacatggtcagcttgattgttggtttgattctaaactcgaagtcttgagcgctgggcaattccatacgccgactcattcaacaacactttttcgtctgctaccggtcatcctgggctcgaacagacaccatttttgatatatgtgtaccaacaacgtaaccaggacagataatggccatggaaactggatcgagatatggaccgactggtttctgaatcgaatacattcttatttccggtgtacaataaaaggatcttacataggttcgggtcaaatcaaagctaagagcttactcagtccggtttatcaccgtagtttctttcccgtccagccccgcctcccatagcaaatacgtcagagaactttcattcttacaactctttgccccgcgatttttccgaaaccctagattctttcaaaccttcgaacctcgatgttctttatgatctgaaatccggaatcgagctgtgttgccgattggtggcgcgctaacggggtctccatacacgtttttttcccttttaccacgacatgatctttgaccattctaatggcaaccggagcagtgcaacattcgcctaatgaggcgccaggaaccatggtatttcccaaggtaaatggaaacctgcatcacagggacaagcaactcgtcgagtctttccgtcctcctccgcgatcctcgaacccatttctcatcaccgagcgccaggacgagaagcaactgtgcatctcgtcaaggagtctgcgcgtgagcgattttgtgctcgtcaagactcttggaactggttagcgcgtggccgaacccatatttctcttacaggagtcgcatctgacggttcatgcttttctcattgtataggcactttcgctcgggtgtggctcgcaaggttaaaagaccaaaaggacaagagcaaagtatatgcgttgaaaattcttcgaaaggcggacggtaagcgccactttgtctaacgttgtgcgtggcgagggacaacttgtgctgattgcgactggaaagtgatcaaactcaagcaagtggaacatgtgcgcaacgagcggaaggccctcgcagcggtcattgaccaccctttcatcaccaccttgattgcatcattctcggatgagaaatgcctctatatgctggtatggcaacttgtttttttggaatacgaaatatgtcttgattgatcacaggatgctgacgaattgtcagctggactattgtcctggaggtgaaatattcacatatctacgacgacaacgacgctttagcgaagaagtctcgactatctatgccgccgaaataacaatgacaatcgagttcttgcacgatgtacatggaattgcctaccgagatctcaaaccggagaatatcctgttggatgccgatggtcacctcaagcttgttgacttcgggtttgcgaagcaagtcgataatcgcgagacatacacattatgtggcacaccggaatacctagctccggaggtcattcaaaacagcggccatggacttgcagtggactggtgggctcttgggatcttgatctacgaattcttggtcggacagcctcctttctgggaccagaaccctatgcgcatctacgagcagatcatcgaaggtcgtctacgcttcccaccgaatatgccacctgcagctcagaacatcatctccctactctgtaaaacaaacccgtcggagcgactgggccacatctctggtggctcgactcgagtcaagtcccatccgttctttcaaggcatcatctgggatgatttgttttatcgccgggtgaaaggacctatacttccccgcctatcccaccccgcggacacgggtaactttgaagaatatccggatccccccgacctcagaaacacgaacatttacacggaggatctgaagaagaagtatgaggtattattcagtgacttctgaaagacttgtttccaattacggcctatcaagctcgcaccccaaccttcatttttccggcattctcaaatgacggccatttctctataacccccacgggacccccacggcacgcgccccgaatgcttctccgctcagaggccgcactcacgaatgatcgcgatcattctcgccaatctcacctttcgctttcagatacgatcccatgacagttcttggtatgtatgtctgtggcgaatctctcggagagtatcacacccctcgccatgctattcaaccggtctcaccgccaccatttgaccttcccttcccacatatccacacccgtggacaacgatatgaagaccatcccgggtagtatctttttttttcttttttacttcttctttttttcatatacacttccctttcgcaaaaaccttgttttgatcgatcatggagattgattaactggaatctatcaaaactacagcaacctcgcaaggtctttaagcgcaatcatgtgaatgggagtgtgttaatgctatttttttactctcttttcttcgtaaagtgatcaacatgcatagtcatgggttgtagatcacgatggtacattggtggttgctttttatacttagggttttcagtatcgtccataagataatgcttggtgcatccgcatgtagttatttcatcctgaatatatagtctcgttccgcaaattccatgtcatattacaatcattcaatagatcatgcctcttgcaatttggccagtagatacaaacatataggaagggagagaaccctatatactagtttggggtgcctaggattgacgtacctagttatatgatcatcagcaattgtcgcagtgggagctataacgcaccttcttatcgtctttggaatattaatgtttatctccttgttcagataaatctgagtgtagtagaaatacatagatcctcctggtggcaccctgacgtggtgggccttcgagcatacagaaaaccacaatttatcaagcccacagatgatggacttcaacctttgatatattgtatagtatgtactaaactcaccccaacagattcttcctaggttgctttgcacaagcggccatccttactctcggtccactcgtcagacccgacagcggttctagcgtagaagatattgttcggatcatatttagccttgaccttgcgcaaggtatcatagttggtaccatagaagaccttcttgaagttaggctgttggaagtcaccctgccaaaatgataagcatgcgtacacaataatgaagggaatcatagctaaatatcagtttacatacctcattcatataagcaccggacttgggagaaagcgcagtcagcttcggaatgaaatcctcggtcatttggcgctggcgctccaacatgagagcagagttgtcccactcccatggggtcgtcaaagtagtatcaatcaaggcttcgcgccaagcagggaggaccgcgttgtggacgtctccagataccttgtgggagacgttcaagccgacgccgataaaagtgccgcccgcctcggtgatctcacggtaggcagtcaacagggcgtgattgttgttctgaacgaccgatctcggaaccagccagccgccatattgggccgtgccaacctcaatggtgccttgcatgtccttgaactggctgtagtagctgtcgtattgcttggaaaccatggtgtactcgatgccgagcttgtcgaggctgttggtgaaaggcttgagcagcgtcaccaagtcagcgacagggatgttgggaccggtgatcggagcaatagagaagctggtgttggtgaagtaccagacgctcatagcacctgcgtcgacgatagcgggcagggcggcgtggaaggtctcgatggtattgaagaaagtgtcttgcgagatcccatcattcgtgtaggtcaggttcaggccagagacgggggttcccgggtgtgccttggaggtcatggaccagacgataccgtaagtgccagcaccaccgccgctgagagcccagaagatgtcagagtgctcattgtcgcgggtagccgtgatgcagttgccttggccgtcaatgacctcccatttcaggacttgatcggcggccaggccatagcgggagcccagtgcggagtgaccgcctccttgggtgtagccaccggcaagaccaacggtgggacattcgccgccgacgacctggtaaccagtttcctcggcgatctcgtaggcttcgtggccttggattccagcgcccatggtaatggcctttccggtgtagtgcttgtcatggtaggagtcgattgacagatccttcaggtggtgagtccagattgcaagcgctccagcgccagtggatcggccattgtagtcgtggccggtgttacggatgacaagacggatgttgtgcttcgttgcgaatttcacagcgttggaaatgtgagccgggctggtgacattcacgctgtagcgcacatagttacccagggtgcagggctttgagacggggtggaacggatcgcaagcaccctcggcaaagaacggcgccataaccgaggaagatgattcatagctgtcagaaacatatgtcagtactggccctttcgtgttattctatatgcagagtcacatactgctcctcaggaagtagccacccatccttcaagactgcacaggtctcggaattgtagttcggcgcatggcaaggtgtgccgagagggacggtcttgactagtcgaccatcgacggttttgttcaattgggaccattgatcctcggtgggccagcaagcatcaccgggaaagcaacggcatgccgaggctgaagcctgaggcagaactgccaacagcgaagcaatgagggatgcgcggaaaaacataacggattgacttcatgcaagtgtaccaggttgcgttcaaacgttccggtcttatgcgcggaaaagctaacaaccagagacggttcgcttagaacatagaaaatgccgcggtatcgcaatatatcttgaagctaataatccaccacgccatccctgccagccttgggaagcaatatcggaatgcagatcggaggggccaaaaccagccacccatggaaaagcctgccgtttcccccaccacccagtcttggaatcttggaagccaggagcactagtactccgtactacatataagctggcttggtacgtatgcaaactttaacataagccaccccaagcgggttcttagggttggaacatatggtccgagtaattgcatacaattcaggggcagatctcacctttattttagctagacctggctttctgctccctccttgaacaccactcgatgtgttctagattatagatattttttctagatggcacaggtctagaatgtataatgcaaaatcgtgttataatggcttgctcatagctaactaagccaagaccgaaaaaaaaacagaaaattcttcttattggcaaattctaattcatatcctctcgtttccacgctcgtgaagctagcgctgcatcttaattgcgccgatataagccccccgccgccccgccgccccacccgaatcaagaaatcttgtacgttgtactgcgaaatacccgtggactccgtcacaattatgaataatatgatatctcctttgcagaggctatcagctctccttgccgtgacaatgatcaagtcatgggctgggtatacaacctccacgagaccgatccaaacagcgagattccgcgcgtgatcgggatctgcttggcgtgttcaattacagctttcctagccgtatgtctgcggttttatgtgcgaatacgcatcagtcgctttccatggattgacgactatgcggcactggcgggctcactgttgacgttggcatacgcaggtatcgccgtggctcgtgagtcgattctcattgatcagcgaaggttaactgccgaactgacgaaatggttatttcagagacgcgatggggccaaggactcagcgcggcgtattttccaaaagagaatgttattccatttagcagggtacgcatcgcaaggtcaacattgttcgaactcgagcccgacgctaactttgtttggtctatagatccaatacgctggcggcccgacctattgtctcgctgtcctcggcttcaaagtcgccttgttggcctcctatctgcgcatcgcggggattatcgagcgatatcgtaaaatcataattgccactattgtcgtgtgtgtcgttaaccaattgattttcgcctttatcatatcaatctcctgcataccggttagcagctccccaacattacgcgccactcacaggaaacgggttatctgacaacaaacaggtcgcaaaacaatgggatacttctctcaaggggcattgcatccaaacaataccgttctactttgccctcgggggcacaagtattgtgctggacctgataatcatagcactacctctgccagtcctttggaaactccagctccacctcaagcaaaaagtcctcctagcctgcctgtttgctctcggcttctttgtgaccgtgatccagatcatccgcatcctcaccgtctgggacttgaagacctacaccgacagcaagaatatcgtgatctggtcttgtgtcgagaacagtctgggcgtgagttgatttgtgatatttctgcaagtccaaggaaagactaacaaaacgaaaacgtgtaggttatcatcgcctgcattcccacgtacggacctctgttcaagtcattcgcttccactgttaattcataccgaaatcgcgaaacttcaaggacttatgcgcttggctctgttcgccaggacacggggacggggacggggacggggcctgggcatggaaatagcaatttcgaacctatatatgagtccgagggccagcagatcactgagattcgatccggcgcgcaaacgaatgatggggatagcgaggagcatatattatcagaggcggagaacttaaaagtatatgtaacttcggagtttactgttaagtctggcgcagtttgattttggttggtaatagggaacttggaaagcatgcttttgaatgggaaatagaagtacatatgcccgataccaaatacgtgttatctagtactcggattagacatgcactgttgcaaattagtcgtgtgtaacaagccccattcataggcaatgggaaattctcgaaaagttgccttttggctatcacaacaatgagattggaatctataagcagctagtatagctagtagtagcaaaccatttaccgagaaaaaaaaaaaaagcaaaataacagtgtacataacaatgaaaaacaaagttggggaatcatatgaacagatatcatgaaacatggaacgggtttagagcttgcgcctgggttcggtcatatccaaggcaccgatgatgacagttcgatgccgatttgagagttttgtgactggagtagaaacaaccggaaaatctagaagggaggcgtggatgattaaatcggagcaaatattgagatgaactgcgagcaagggcctgcgataggtctccgatactatacagtgtacaatgttggaatggaatagaataagctttgggcatttttcatagcgatgggtctgtcttccatgtgcctaaaaaatgttagtactatgtccatgtgaaactacacgaacgtgtcaaaaataaagacgtacctccgaaattgtgcttcacaaaagccatgggatcatctgtatcccccgcacccatttgccccactccagggctgaagctggtaatggggagaacaaccacatccccaaccttgcggtgcgtggtttgatggctgaagtcttcgtaggtgatgttcttatcaccaggctggatattgaagtatgccgggttgttgaagtagcggaaaatagaatccgtccaggctccaggccctgtgaactccataatggtcttatccatcttaccaacctttaggatgcctgcctttttcattcgcagagcatgctcggtaatataagccaccatatcacgaagaatcggatgcccgggtttagacacaaaggtccactggcagaactgaagacggcgcgaataccagtcgtgccagtcatcacggtcaggatcagcttcgatgccaacaatgaagccgatagttgatcgatcgagttcctcggggagccacgtgtgcgcgggcttgagcgccgaagtgtcaatatcgctgtatattcccccgcgcgctagaaggaccaagtatcggaagaaatccgccttcataacaccgagcggcagcgaatcatatgcctcaaatacctccgggactgatccatatagatatttgatcagatgttgttgtgtgtcatcaggaatgacttcatgcgtgaacccggggtgcatctctgtccagctggcctcggggccgcgaaggtcttcgtcaaaccagaacgatcccgggctgtatttccatgtttgccagatgtatgcggggaatctgttttcgatttcataggggaattgataccggagacgttcgcgaaggggtgttgtccgtgatgcgccgaggggtaattgggcgcgaccttgcggtggtatttttcgtgctaagtttgctatcgcctcatcctcttcctgcgatatcttcttcaccggtctatacccaggtgccccgggaacttcaggatctcggaacgagcggaggatgagaacaaatgtgaccacgcagaacagggcaagcagcaccttgcgcggggtaatcatgacaggcgatggagccggcgcagtcgggaaataattccctggtcttgcgacagccgtaaataggctgaaagataggaatcaagtcaaggcctctgtgcttttatcttctgtgatccgcgggattggtgaatttgattcttgttatgcgtttccttcggcgggtgtgacagtcgagcgattccaaatcctaggctaaagaaattgagagggtgacatgtcgatatgcggaagtcttggatgtgacctcgatggtcggagatacggtcaacccaaaatcgggataggaggcgtgaaaaaccaataataattgagggtgactagtaccgcagaacagcaaggataaattgaatcgaagagcaggccacgctgtctagcagcgggtaatttctcgccttgttggctaattttattagacgtccacgagtagaataaggattgcgtatgccggaagcagcttctagcctgggtggagccactcacgtggtcttagaaatgtaacttcaaaccgccgtctttgatattgtttgttcttcatttattctttgttctgtcttttgcaaaaaaaaattttgcatatctctatgctattaacaagcaatgatcctactgcataatcacttggttttgttagagcgcccccacataaggtgctcgattcagaatagtcttgatctttagtttcttaactaaactgcgtaaaactacaatgctaaaattgtctagcctcgtatccaatatatataagtagtttagcatagattcactataaactccgatagtgatataagcttcgcttggtttagaaatctaatatggaaccctgtacaatatatcgcagagcaaagagcatccttttaccgaaaacatcagatctgccaaactttagggatttttgggctctttacttttaggtgattaacaagtattcaataaccatgtaggaagggccatgtactactattacgagaatacttgttcttttgataggactacgtaggcataggcttttgtcatattttgtctccacttttcgcattgcggactaggagacgtaagaggaaaacgggtcaaaggcaccaaaatagtaccctagagaaatgcaactataaagaatattgttagagatgccggtgagaggcttgccggccgataccttctcgttatgctctagatctttatccctattagcaatggagtatctctactccgtagtgaacaataatcttggctccgttaaaaatcctattttatatcatacaatataggatcatcggaaaatttaattagccaagggggagattctctctttgtccgtgatgatcttcgtggtagaaatagcctctaatactattaagaggatttactccgcttgatccctagaagcttaggtctcgcgtcaaagcatttattctcaaccttaaggaatggatttttgttgcaagataatatggtttttatgataaataagactaatacgcgaacgcgaacgtgaacgcaaagtgaaagcaaaatgaaagtaagacaagatcaatccaaaaggaacatcatccccgacgcatgatggcacatagattgaggaccacttctttcctattggactcattgctaaggtcgtaccagggagtggccaccacaggaatgaatgagtctagcgaatccaaaccaaaatccttaacatactcatcgctaatctcaaattggagaaagcgaaggtagtgctgcgtagcatgaatgactatgacggtctcacgctgcacgtcaacaaaccgagccaacagagcctcgcatgtcatctgggctagacacgcgtctgagatgatcggtttaccctcctcaaaacattggaattttctcttggcttccagaattgccacatgatcgttttggagtataaattccttggcattattctcatcgcgtgagcaaagacctccgtcatcaatggcagtaatcgagctaattcctcttaggactgtccgggttcgtaacttgatgtcccgaaactcaacaacactcgacatattgggctggtcttggggtgccccgaaatatagaatatgtcgaatgacgcatgatgcaaggcgcacggtctcatcttcgaccgtacctcggagttggtgttcctctttttcaatgtatccagccgatgacgcatcgctagagctcggagcccggggactgctagaagcaacttgaattgtcccagaggggacgcattcagaaggggacggttggttcagatgattcttcacgcgcccctctccccttagccctagtgatgcggccaccgtcgaattcagtagccattggaacatcagaatccgcgccatcagattcggtatcggaatgttcggaattgccgggggcaattgcatatcctgtcctcttagcgtcacgatcacccttgaatgctcccaatgctgaccacgtttgagcgagcgaaatgctatacccaaagtctcgcacaagactgtgctcgcttttctggaaatgcgtattgctatcagggcctccgaggaacttcgtgatatccaccgaagacgtagtatcggaatatttaaagtgttgggacaaaattggaagaatattgggcctttgtggtcgtattataacacgacaggcaagtagatggtcccgtccccatccactcgcggcagacattttgagttcggaagggtacttctgatttcttcccttgaactgaatgacagaggtgaaagtgtcgaaataatggggagacatgttgaagaacaaaattgaaaaggagagaggatctgtgatgataagaatgaacttgggcaggcagtgcctttttataccacctcttctgcaaatgtttgcctttccaccacatgaccatgaaacagagtgttggtgatgaatgcctgtataaccgccaggcccctcattttgaaactgctggcttggagtacaactgcagaggtccaatcggtttgttgggttagtattaataggcacgtggctggccaaccatatacatgtattatccctaccatatgtattattctaggccaaaggctcgtgaaaatcctttattagaaacatgagctagcttagttggcccctgacagctcccgtggtctgagagtggatcgtgctttccctaagcgccgagccccgtcatgccggacagtgacattcgatcacacttatcctcgccaatggccaggaacatccagctagtcatacatttagcgctgttaggtcataatacgcttctaggacccaatttcagcccaatttaatgtaaggggatcattgctaattctgaaatatggatgtgaagcaaaaatccaccaatagttcaactgatttgcactttggatgatcgactggaaacatcaaattagctgtacctccccttagatctggattttgctagttcagggacttgactaggctggaggtcagtataggacgggtgaactttcttccggatcaacactcaaaggcggtcaagacccgttttagactcccttgtattcccagttccttaacctcatctttacaagtatcttcagtatgacagctggcgcaatttcgcttgctgagctcatgagccatcatcgtgatctcttggttcaaccaatatgctggacttctcgtcatttggatatgctgggatgtcaatttgaacactttgaccatgtgccaccagacgacatcgaacctgatttagatccatgccaaccaattgatcacgaacagaagttggaagaacggagtcgcggaactcccgaggaactctttgaaggctcctctatactaagccggccgttcggcctctcatttctcatatggcccttgcttaaccgaagatggtgagcaataaaagccgttcgtgtcattgattcattccgccataactaaacattgttcacagtgaaacaccgtattttttttttgcaaataagagaattcatcggcctctgtatgaagtgttctatcgctgccgtaaactcagccagccagctagccaagcaccgcggccaatcgttggatatttggattattgccgcgtagaacgttaccgcggggaaatgtttatccctcgtacgcccaaacatggcggtgacaaccgccccgggtggagaattcagatgaaacgagtagcccagatcacaccaaagaactggagcgaggatccgtatctgctgtgtgttctgttgtcccttgcacagctccaggagtaccatcgaaaagagtggcacccgcccatccacatagtaagtactctgctactcctgccgtttttcttccttggatgcctggctcatttatacaagtcgcgtctgattttgacaaccaagccgggcgataaattcttccatatttttgaagctcacataacttctgagcttctcggaatgcttgacaacccaaatactgccagaaagcacatagactggccgaccatcaaacacaaaaaggtcctattcagacctcttgatagtctcgcagagcgacttcaagctgagatcacccttaaccagccacctggcacattcgatatctcagatccagctaatccaaatgacatcaaaaaagaagaagaggatgtaatccacatccaaagaacaaaagaggtcgaaaggaagaccagaaagagagcaaaaaaagaatcattcgtccgttccgagacaagagtttcatgaaaatgcttaaacaaggattacgacaattacgccctggttggtctgcgaggtcggctattagaccacactacaccacaaacgactccaaattcccatcatcaaatgatgccatgtctgttattctacattccctttctgcgacctgaaatttactcccatgacaagccttacacatcacggaaacggaatgtctgaccgtactcggacgcctggaggccagatgctgggtaaaggataaagggcacaaaatggatttggtttctctctatttcccaatcggttcgctcaacctacgaaatgaattacgatagtataaactcatagtggaaagattatgtccttggatatgtcgaagcgatacacaaacagcatggtccttgataccaagccagccaagtgctgtgttcaaataccaaagaaaatgcatcacaagcaacatgaatactgttgaagcattgagtttactaaaggctatcaattggtcttatattctttcctaacacttaaaatcatgcgtaaaaagtcaaattcccaaccataacagcatagaatttccgagtgagcatacggtgatcacttcatggcaactacacctctggctgtcaaccatcaactatatatcttgtccgatattcatatctcattcttctgatcagaaaaatccgtttttcccacgtaaactaaataacttgtgatctagacaaagccgtttggatagcgaatcaaggccgtcagctgttgtggaacatgatccacactgccatgtgggactaatcagccgcaaaagcttgatagataagcgtagcagacctcgggaaagaataaacctgatctagcagctttataaacatcaagactagtatgttatatagaaatccgctttggaagtctcgttaggtagacgcaacggattgtgagttagcaacatagacgctatccagttcaactagcaatgctctttttttgattcaagctttattattcatctcaattgttctataattcgatgatagaaacccagctttccaaaaccaccgtatgcccagtacagataagccatcacctggtccctctcgctgccgaggccagccgagagcaggtgatttgattcttcatgctcgactgatcttaccatttcaagatactctcctcgctggcgccacctttctcgtagtctctcatctaacggctgtccatcttggtcgtatttcctaggtaagtcaaaagaggcaggtatggtagcgaggaagctggggaacgaaataagtttgcagagagccgtaaatgcgccttcccagtcgatgattcccgttatatcgaagctgttttcatctaccatggtctataatcttactatatagaaagtcatcatggactagagggaatggccctttgttgcacatagatagccggctagctatcgctttgatctgcaataggaagttctcgataatcgtaatcatctatttcgctgagatcggccctctctgtatcatatatatgatcgtttctttatcccacttaaacttaacgctatcggcccacgtctcgaaaaatgcggttgctgtgttatcgaatgtaccgccaattccgggtaagggtctacactcgtatccaccctctcggttccgaaaaatcatcccaattttcgggagtcgtaaagaagttaactagacctatattgagaggtaagctaggcaccagccggccctataggtcgactaacatgacagtttgcgacggtgcgatagaaggcttatcggtgctctgtatcacaattgaagtcgtaaacgtgtggcgatgcagccagagagcagccccataactataaaggcagatcccacaggattattctcgtcaatctcatacgcaaaaactcgaggcattggtaactgggaatgctccttgatgagttttattgctacaacttcggattcgagttgggagctgctaacgacgtaagaggtattccttcgaatctgaacccgggctacccagtgagtctcgtcgcaaaatttagtacacggacaatattattgagcctgcttgcaagttgcgacctggtctaaaaccacgcattccaaatggccagcaaacccaaagtaattcggcagagctcatcccattgagtccgatagaaacaatcggagatttgactattacatctttccaggaaatcatgctcggtagtccaaggggttgagctgggagacataatcacggactatcgagttcatgtgggatatcctcgtaggcttctataggaggagaataaaatagagagaactgtataaaataaaactagcagcatacatacttggtacgtgcacgccgtattgttccatcaaatgaaaggcagaggaaatcgagaggacaatcgatccaaaaggaggtatgacaaaccagatctacagagggtacttcattcaaaagaacagatataggcaagagaggagcaagaagtggtagtcctcagtaaatatacatctacaaattatttaaagtagcaaattgtcaaacaaactgtcgagcaatttctacaacatagcatctctggcacgtgatagccctaggtcatgacttgtggggaaagaccaagggtctagcccgccccactttgacgccccacttactcaaacgggccaacataagataagcaataaggcttgaaactgttttgagattgaacaacgacctcgggatataagagatagtaccccccacatattataggcctcctacatggagataccgcactgggctgctagagaggataacctgtcttagcaaatgaagtgctcgatctgttaaatcatgaagtgcggaactgctggttttatgtaggggctacattgttactcctgcggatgagggcagaggttgaacaagacaggactggcggataagcagaaattatgggcctttatctaggttcttacgataaaaataatcctcagcatcaaagaggagccgggacttacctgtcatgcttgaaggagatgatcctcgacgctttcatgcggctgaagaattcttaacttaatatgagatacgatttgtgaatgaatcgatggtggaatgttaccttcgggcgactcatctgagatgcattgcttaaggccacactaactacaccttatgtgtttttattgggtcggcaaaaatatcatagaaatgtgtgtggagcgagggctcagagggaaaagtacagcattgtccctgtggcgactgcgatgtacaaagactagcaacttttgcgcgattttcctttatagcgcctattctaaaagagccaatcatcttctgattactcctcgtctgaattacagccaatcagtctgccgcttccaaagttgtgtctcggcttattcttcccgttttcacatcatttgggccatttatcacctcttccaaggttgaatggcatgctggataagataagccctgtagactcccgaggtccagaagtccataaatatctttctctcgcttgtctcttaacctccatacccaatttcaaaccaattgcagtggaagtcattcactatggaatagcccgactttcttgaccttcctgctcttacccagagcctcaaccactaagcaatcttgattcaagccaacggtgtctttctgcacaagaaatcccagcgccagcttgccttgatttcactggaatcacggaaaagaaacaatggcgactgctgtacctgaaaaatacgtggttcccgctgtcgtccagtccatcgtagttagtgaaatcccaggcagcagcattaaatcttccttggattcgacagtgggagccagagcagaaaagggagaaaaaaaaaacttttttactcgaccatggggacgacgtcagattgggatactctgcgttctggggttcttcggattggccttaacagcactcgtcattgtcctccccatttatttcactaagatctacggctttgcgaaagacactgataactactggagactaccccagccaaatgaagaccacagctactacctcgaggagaatcgacctgtcttcgccctggtcaatttcccggacccgggcctcattcaacacaatggcacatggtatgcctacgggaccaatcccaagaaaaagaacccccacactatccatgtacccgttgccacatcgaccgattttattaactggactcttcacgaggattacgacgcgatgccgactcttggcacttgggagaagaaggtcaatcattgggctccggatgtgattcagcgcgtaagtataccaatgagcattagctcctatccagtatctgatattcatatatgaacttttaggacgacggcaaatttgtcatgtattactcaggagaagccgagaattacgggagccaccattgcgtgggagttgctatatcaaccggcacgagcccactaggcccttacatccccgaagacaagccactagcctgtccacacaagcatggcggtgctatcgacccttcaccgttcagggacaccgacggcacgctgtacgtggtctacaagggcgacggaaacagcgttggacgcggcggcaactgcaacaacagcaagaagccagttgtatccgttccgattctcctacaggagctgaagagcgatggtatcacatccgtcggggagccagtgaaaattctcgatattgacgatacagatggtcccctggttgaggctcctgatatcttgctcaccgaggacggcacctactatctgttcttttcttcgcattgctatgtctcgctgggctacaatgtgaaatacgcacactcgaaaaccctcaagggtccgtacatccgggctgatcggcctttgctgcagactggtgattgggggctcgaggcgcctggtggtgcgacggtttcgactgatgggagcaagattgttttccatgccaattgcggtagattccggtgtatgtggtctgctgctattgatattcgatctaataacaacacgattgttatgtcgaaactcgtgcttggccaggcgtcgaattctacgaaaactacgggaacactcgtgagccggactaggaatagcggattgcgatacctttgagcaagcaggatttactatgatatattcttcacgacttttatgttttgaatttttttgcatctcgcgctgggcgttttggatttcctcatttttgctaaccgtttgtatgagaatcctctagggacctcagctatagctactttttcaggatctatcaaaagccgaactttgcatgcttccaccctccattccttgtttattagcccttcgaacactggatttacttgatttcttcggtagcctctagcaccataaactagccattctccatagaaggtagaaggcgaggatacaaattaacctgctcttttggtactccgaggctaatcaattccacatatataagacagccttgtcagacaaagttgcaaataatatctatcgtatgttgtacattgacattgcatacttcaacgctgaactctccaccaatcaccgatgtcggtgatgacgcgactgcttagtgcctgaggtgtctacatattctcccaccggtagctttcaacctaggaagctttctttccttcctgactctcacagatcctacgctcttataatgcagtcgtttcgaggcgccgcccgagctgcttcacgcacaattcgaacccagccatggcgacaagccaactcccctgtgaacaccgcggggtcgcatcggactttatcggcgccatggaagaccgcacacccattgcatactgtgtcgccgcgaaagtcagcatcagccaccgcagagtcaagtgagagagactcctccaatccagccatgtcattcccctgcctcgatgcccaagaagcgaagtcagcgcaactctccgctcggtcgctgcaatccggccccgaaccttcatacaccactgggcggcacgaatcataccactgtgaacagccgcttctgctcgactggggcggtgtgctcacagaatttgatattgcctacgaaacctgggggcaattgaacggcgacaagagcaatgccatcctcttgcatactggcttgtccgcctcaagccacgcccacagcacagcgtccaaccccaagcccggttggtgggagaaattcattggccctggattgcccctagacacgaataaatatcacattatttgcaccaatgttctcgggggatgttacggaagcacaggcccatcttccctcgatccgtccgacggaaagcggtacgcaacccgcttcccgatcctgactttggacgacatggtccgcgctcaattccgacttcttgacggcctaggaatcaagaaactcgctgcctccgtcggatccagcatgggcggcatgcagagtctcgcagcaggcgtcctcttcccagagcgggtcaccaaaattgtcagcatcagcggttgcgcccgcagtcacccttacagtatagcaatgcgacacacgcagcgacaggtgctgatgatggacccgaactgggcgcgtggattttactacgacggcatcccgcctcactctggtatgaagctagcgcgcgagattgcaaccgtgacataccgcagtgggccagaatgggagctgcgctttggtcgccagcgtgcagaccccagtaagcagcccgctctgtgtcccgacttccttattgagacgtacctcgaccatgccggtgagaagttctgcctcgagtatgatcccaacagtcttctttatgtctccaaggccatggacttgttcgatctcggccatgctcatcagagcgcgactctgaaacgccgcgcagcgtccgaagagcgcattgcgcacggcggcgacgtcccaattggctcagactccgcttgcagtctgactctcccagacaagccctatgaggagcagcccggatcaacctccaatacgaccccactggacaagtccgtctcagctgactcggtggatggtcctccccgggatcttgttgtcggccttgcgcctctcaaggaccaccctgtgcttgtcatgggtgttgcaagtgacattctcttcccggcttggcagcagcgggagattgccgagacactccgtgctggaggcaacaagaatgtcgagcatattgagcttggtgatgacctgtcgttgttcggtcatgacactttcttgttagatctcaagaacatcggtggcgcattgggcaagtttttgcgctagtcgcatggcgatctgcgtccgaggcgataaagaataattaaaaaatttgtaaatacgtcgttcagcgtgcgacatttggcatttagtaggcgttgtacatttacgaaatggaaatgagatgcctcttctctgtttttgtttgcagtcgggaatcgatggatacctccagacagtctacaagtggatggtacgaaaaatgaacagatatgccgatgtattatttcatttgattctaccaagaggttatatgtacattgaactccataaaataaaaggaaactcgccctcaggttgctctcagttttcataaccggcttccagctgtatacacggtccacaggcacgaagtgccatgaatggagccgtcgtcaagcagatgcatcagaattggcttatgttcgtctgagacgaactcatcacagggcgagaaggggaaaagctcataataacacgacccacaaagcccacaattctaaaatatcaccacacccacaaaaaagcagaaaggaacaaatataaaatcaagactgagaacatgaaagtcaggataaatgatgaaaagtaccaaatttcagttgacgtactaggagaacccagaacgtttatagaaagactacagtcacattgcccacaaggccaaaaatccaaaaatccacgagacagacaccaaaagtaaagcttggaagctaagttctttggtgaaagttttttatagaatcacaagacaaaccaggaaacccagaatgtcattgatagtcgaatgattattgttcgccaatgccgcattggagaaacgtcaccttaatggatattccctcgaattcagcagcttaaaggtgcgaaagagaggaagtggagaagggcaggtatttatactgcaggcacagagtgcacaaagggaagggtcgcgtatccgtttgtaggcagagctgttgtccttgaggatacgcctcagcgtgtcatataatgagtggctctcttcaacagggagacgaagcaacctccgatatctatcatttaatcacaatagctgtcgaccgtttttctccacaagaagatggcctatctttgagacttgttagaggctatgcggttaactctttagattagcaggtgtcataggcgtgtgatggtagccccatgaagtcgctgttggctgttgcctccgcgaactctgcattggagatcctaaggtgcaggatatagtcatagacttgtacaaaaatgactggagataaggaattcaggcttggccaatgccttaatgggaatataaaattgacaagaagcactgatgttgttttaagtccaagggattaaacgttcttccgtcccggtactaccagtatactgctttctgcctgaggcaaaagccatttcgatgcctggggctattctactgcatggtctctatgacgttcagttaggaatactataacataggaactgtttcaaaattgtgtttctaagaggtcatttggtgctgcatttcccgggtacttgtgccaacgaagggatgaaactatttgtatttgatctatcgcatcacgcccaagagtcattagaattcagaaactggaccaaataaaacaggcactatgaattcagagaagaagctcaagataagatttctaaccacacattggtaataaacatgccctcagattgaaaactaccatgttttgtcactcgtcaccggcgtgcttgtcgtttccttgaaaggcgtacagacgaagcacatatacagggcctcggagtatgtaactgtattttctcatcactgggatattataggagggaggacatgaaaacacctcacgatgaatatagtactcgggagggaacaggtgattggcaaacaaaaccgaaggagatgtgagatttggagatatagaatatgtacaacacccctaaacgatgttagttgaacacattcaacaaaattccttcaagataacacataacaagaaatatcaaaggtccgagtctcgtcagatctctgttcattgttcaatcacacacttgtgggccgatgtcttcttccaccccgaggtatcagggggatgaagtccatggcccgacgggttcagtcaaccgacatgtcatgaaagctcttgtgaggtttatcgtcatcaagacttggcacgagatattccattgaatctgcattgaagctagagaccagagaaccagtgtgagaaaaacataccttttgtaatggatagcgaataattaggccgatgaacgcgtcgttattgcatcttctcaagcgataagacatagttgccggcattgaccgacaaatttttatcggattaaacatcaagctgtgcctagacgcgactttctcagtcaggctctataatgtgatgtcgagactgatggctacatcggtctgccaacaacgaccttctattgagtgagatgatgcaagagcatatatagcaatttcataagataattggccggcaaaagaaattgtaaagatttcggagatcgcatgagtgttgttagaaatatggtaagcacggttatgagcacgttgaccgcctaccataccgccttacttagtccctgcacaattacctagcaccgcagcacgtgatagccggcgtagtttcacgaatttggcttgcatatattccgttactagaagtccatatctgcggtcggctacttgtcatggtcagtacatcccacatccataatggctcccccagtatcaaaatggtggcaagagcccaacgaggtcgacctcgactacggattcgattctgacgaaccggataccagatataacgaacctgatcgaaacacctcccacgagaatagaagcaaatcgagagatatccagaatacatacgataagggtgtgattgcaagcatgtcttcttggctccaccgtcaggctggtaccccccacggacagcttgcgacagcggccgtcgtatccggcgcagctgtcgcaagtgccatccttgggtaccagtcatacaagcgcaaggaagctgttcacgatctgaaggcttcgatcccaagtatagatgatttgcatgctgcagaaatggtgagatgcatcggtgaacctgcgcattgagtgccaagcaagctacagggcaaaagctgattcggcggactatagctcaccgattttggcgctgcctcgaatggaatacagctgagcaaggaagatcagcgcagtgcagctttagctcgcagagcgcaacagggggactacgatgatggtatgtggcttttctatggcatgcttctgcgaacctatctcactcggctcgtcttgctttgatagacttgattctagaacagctcgcccgcaaccgtgtgttccttggcgatgaaggccttgccaagctccgatcgtcattcattgtcgttgtcggctgtggtggtgttggttcgcatgccgctgcctccctggccagatcgggcgtgtcaaaaatccggctcattgatttcgatcaagtcacactatcatcgctgaaccgacacgccgtagcgacattggctgatgttggtacgcctaaggtccagtgcatccggaggcgattggaacaaatcgcgccgtgggtcatgttcgattgccggaatgagctctatggaaaggccgcatctgacgagcttcttggcccgtggtctctgacacacgacggggagggccgtagaccagattttgtgttggattgtatcgataacattacgtccaaggtagagttgctacactattgccacacgaactccttgcctgtgatttcgtcgatgggtgcagggtgcaagtcagacccgactcgcgtcgtggtcggtgacatctcgctcagcaccgatgatcctttgtcccgcgctacacgccgcagactaaagctccttggtgtttcgtcaggcgtcgcagccgtgttctcaacagagaaaccgggcccgggcaaggctaccctgcttcctctccccgaggatgagttcatcaagggtcaagttggtgagcttggagttcttcctgacttccgagcccgcattctcccagtgctagggaccatgcctgcagtctttggttacacggtagccaaccacgttatctgcactattgctggctacccgcttgactacaatatgggcgccaagggccgcgagaaactctacgataccattttaaatgcattgctaaacttgcatgaaagaatgatcaaacaaaccaccggtcaagataccgtgggactccgcgctcctctcagcaaggatgacattgcattcgttgtagaggaagtataccggggaaagagtgcgatcagtggcttgtcgaacagactggctctcgttccctggcaaactcccgcacatggatggaagatggatctgagccttgagaaagagggacaaaagaccgtcccgatgaacatcaatgaactggtctgtatgacgaaggaggaggctctccgacacgaaaacgaggtgcttaagggtggcaagaaggtggaagatgtatatgatgagactgttctccagcgtgtaaacctgcgcagacgggaagcggaggagtacgatcagtaccgaggatagtgtaaaatgtacaaataaaccaaaaggacaaatatcaagttccaaacagaaacaatataaaggagtcgaacgttacggcctaataaaagaaagcgggtctaggtatacgtcagagccgcgatggttaattctgcctcttcacattcacctactctcgctcaatttcatcaaatgcagcacatgaagcatacagtacactttcagataaagatataaagcctaattcaggcgcaggaggatggcgcctcttgactcccatctgcaggacttcgagaccaacagggcagataacgactaccacccgaccacaacccaccgtccctcctacccaaaacaatttacactttattctcgcccactgattgattccgccagaaacgaatggcaattaagagccgccgcagattcccagcgcgcctccagctcctccgcggatgacatcaaatccccgggatggtcccaaatggctctctcggtagtttccgcgccgcggttccgacatgtgctgatatatgtcgcgttgtttctatttgcatttatcggttggcgaatgctggtttctccacgactacaagagcaaaaatccctgttgcattcacttgatccgacatctgagacagagacaggtgggtggttcgggacaaactcaaaccctcagttcgacggcttgattcagatccgtaccttggacccaaacctggtgcctgggaacatagcgggagtggtctcagggaaatctagtcggaaacggctaatcattgtgggcgacgtgcatggctgtaaagatgagtgtaagacataccccccaagtgcgggaatccctgaaactgacaagcctacaacagtggtgcaacttcttgaaaaggtttctttcaaccaagcaggtggtgatcaccttatttttgtcggtgacatgatcaacaaaggaccaaacagtccaggagtcgtggacttagctcgacagcattcggcatctggtgtccgtggaaaccacgaggaccgggttttgcttcttcgccacgagatggtgaatactgaaacgctcgcaacccccgatgacgatgaagatgctcgtttctcatccaaagaacttggcgagcgtgcagtcgcgcggtctttgagcgacgagcaagctcagtggctggagaactgctcagttattctgaatgtcggccaagttccaggtatgggccaggtggttgttgttcatgcgggtctagtaccgggcatcgaacttgagaagcaagacccttctagcgtgatgactatgcggaccattgatctagatacgcatgtacccagtccgaaaaagaacggcatgaattgggctaaagtatgccttctctttctatttcatttcttcagtcttgtcgtcatactgacataccttcaatctagatgtttgataagcatcaatcaaaattatactcgagcctcgagtcttctactgaagatccccttgcaggcaccatgactgttgtctatggccacgatgcttctaggtctctttccatccgcacattcacaaagggtcttgactcgggttgtgtgaagggggggaagctcacggctttggttatagaggatggcggaaagcaaagtattgtacaggtgtcgtgtcgtggttatatcgaggaataacaattctacacgattgctttgggtccagcattataggcaaatgtattcttatgtggtggctaaatgacatgtgatggaacgctcaccattatgaactaggtatggcctgtaggaagtcaaattcagattgccggcttaaagtttgattagtcgaagccaattgtcggaaaaataagacaataaagaatagcaccagaaacctcggtggaatcgatggtacgaactgttcaatccagcaggtgcttgatcaaccataacacagagagtaatgtgttgatccacgcggatgtgaacagaacagaactgtagaatatagaacttagagcttactgtatgagggagggactaagcccctgagggaagataactagtattaccaaagattccgaggtcagagcctatacgtcgcaaatctaccaagaatatctgtctaatttcaagaagcatgagggtatgtacagggtggcactatggcgcagttctctatccggacttggattcggatccaggatcctcagggatctcagaatcagggaaaacaaaattaccatcagcgccccagacagcaggtggagaaaagtcttcataccaaagaccgcccaaagcattagtgtgaacgagtccaaaacggaaatactccacctcgtcgggataagtgcgagcccaagtaaaatctggaaaatgctggccatccttaggtcggaaaacctggaagcgctcgacatcgttgaccaaaacactcaggccgtcggcatggggctcgaggtccgggaacgaaaaaacgaggttgttcgcatccgtcgtggaaggaggatatatctttggtggaactgtaccaagtttagcaccatcaaggagtgcgcctggagtttggaggatggaatcgaagccccagcgggcgatgccgtttatgaaaagaccaataagaatacctgagtataggagactgggtcgcgtttgcagagttgttccaggtaggaagagaagagagagaatgtaatggtggatgcgtaggttcatgttcggaacggcgacaaggatgagaacaactgcaacaaggacgccgtagatgcttatcgtagggaagaagcggccttcgcgacggtaacagtgtgcttgaccaaaggcgattacgatcaaagacccaactacaatgatgagagctgtgagagcacccggttgctgctggatatcgtgaggtgtgaggcgagagattggaatgcgatcaaatgtatccgtgttcagggcgccaacccagcagccacccagccacaagacggtcttgtcccagtgtgcatccaaatttttaagcgtgtaccggacgcagaagtaatatagcacgaatcccacaaatgcgccaggcaggaatcgaccgagcgcaattgacacaaggtcataatagctcccgatcgagggcgggtcggacgccatagcgacttggaaccagacaatgaaatacatcatggagtagaatgccggtgctgatgtcacgaccaatgataagaaggtggtccagatcaaagtgaaggcgaagagcgaccaacgcgcatcagaacacttgatcggtgttgtcttattcgagtctggggatgaggcttcattctctagtcggaatgacattgggaagcttgagagaaactcgatactttcaattccatgctgcatgatagattggaagtttttctgctcgccggtgcggtgcaggataccacatccacccctcgcgtcatcaattagaccagcatgtagtgctgacgcgcaaattgacgaatcgccgcggtaaatgctgctgttctgatcacccacctccagtggcttacctcccacgactaacggccggtaattgagctcctggtcgccaacaacatacggctccagaagaatcgccgccgcacagcctgaggggcagcggaaggcgaaggattggtcctcgaatgggcgacaaaggtcaccattcagtccgcaattcgtagaattgctcctatatagatatggtcaggttcacaatatcaaatgatctacttagatataagaatagaaacacaccatagacggtggtgacacgaaagcttgacgggctgcccaaaccccggaacctcttggcccgcgacagaagctttgaagcacgcgaagaacacgacaatccaaaaaattaaaccgccaaaaaggagcgcgatctttgaactcttgcgcggaaatttctggtcaatcagacgcgccggcgcagcctgcaagctaggaaaccaagggttaatgtgatagacatgcggcggcgtcgggccgcggagccaagcgcagaatcccgagggcgtacaagaaaacggcggatcacgctcgaatttccccgattgagcctccatgccgtcgacttccgagggcagaagaggcaggttgcctgattctaagtccaagctcagttcatcgctgtcgcgggcttcatctttgtaccgcgatccgatctcctgcaagggatactcggaggtcgacaacttatcttgtgggggtgatggcgcacttgccccagcagagtccggtcgcgactgcatttttatatacaaagtctttacctgagctctggcgctcttagcgggaaggaagtgatggaattcctcatgttcaatgtcgaactagcaaccttgttggccctggaatttcttggcttttagtcatccgatatcaaattgtggaccctgaatcccatcttggacgtgttcaaagatattaacattgaatgcatagtctagtcaagctatatgctgtgaatgtgtctcagagtgtaccaatttagtgtcatgatctactatagaccgctatcacatgcttatgttcgcttgctggcttactatttacatagtttactagttagtttgcatttcatggattatttgttagatcgctaggctttgcaacgtttgtagaagcgccagctatatgagcaggcaatctcctgctcctgcacttgcttcttctttccttttccaccttagtcaccacgttgaatgcactccttctcttcttcagatcgacctgacgcctcacatttaggatgataattctaacggtgacgttgccgccgactctgttaggtctccgcctcttgatagactacaatgggtagtcaataaacctagtcacactccctattatggatataccatttagtaaatagtgtcagctccctatctaagtcccagccgatagaaactctaagatcatcccgtatcaggtagcattcccgatctccttcccccgctaagtataatagtaacaagaaccctttgtggaggttgcgaagccgatcgccactaagtcgtctcaaccaaaatcccctcgaccaaagctgatccttcctctagggagagagacctctagaccggtgaatacagcagcagcagcagttgccgctaacgaccgtatagggtgctacaatgtttagtcttgttttttactgattagctctgttctattctattaaaattctattaattagttcggcaaacaacaatccggtacctccgcatatgtatagacaatacatctttctagaagagataacctcatccagttcagcctacaatagtatgtatttctatcgagccaaatattctttatttcacttctttctccctgggctcaaaatacccatcgtttgagcaccacattgctctaggaatgtacagctaacgtacgttccatccggatgagaattacttgtttgtttcccgaatttctatcaagtcaggcattgcttatattctttagataacctttctccatcttatagtacaacttaatatgtccacctatagataagcggaatgaaagagaaagatctctgtatcatgtggaagagttgcttcttataacacaacctattcgttgtgaagatagagcactagtgagagtgaggaaaaaagacattgttcttaacacgcaatgtaatgactgttgaatggttgattgacgttgatgatatgtggaaaaaaggcacgtgatatccgcaagctgtcaagctcatgatttcctcattcagatttcttccctgccaacgcccacgatacccgcgtttttcgggtcgctgacttggtcaatccttcatcatggtgagactcacacttatcagctcaaatccacggggaaatccccatatccatgtcgagtcacgtcttgctaattcaagcccccgctatataataggcacgcaacagtgaaaaagcgcagtctatgctgttccgcttccgcgcgcagcaagcagccgacctcggaatcattgatgtctcacgcacccgacgccccaaagcgatcacgtccatcgatacggtgccagtatgcgagcgctggcgcggacaggtcgtcaaagaaatttcgcgcaaagtatcacgcatccacgtgcaaagcctgagcgactaccagatccgcgatctcaacgatgagattaacaagctcatgcgtgagaaatgggcgtgggaaatgcaaatccgcaacctcggcggaccgaactacatgcgtggatcgaaccgactttacgacgatgaaggacgcgagatccccggcggaggaagaggctacaaatattatggtcgtgcccgggagctgcctggtgtcaaagaaatgattgaggctgcggttactcgcgcgaaaggaccggcggaggaagaggctgtgtctggccgcggtggagatattgcgacgaggaaggttgatgccaactacttcggctatggtctcgatgaagaagatggtacgttattggcgtatgagaaacagaaggagaaggagtctgttgaacacctgcgccaccaaggagaggatgatgctgaagatggctggcaatctctacctggtgatgcgggcgacggggtggaatggagactcccgacgctggatgaggtccaggaagagcttgtggataggcggcgccgccgccttctggacaagatctcttgatttagatactgcgttcaagattccctgtttctatttctgtcctttgcctgggttcggcgttacaggtgcttgtgcaatatctccacatttaaggcatcattctctgtttcatcgtaatgacaccacttgatcattatttccaaatatccacaatatcccgaaggcggattcattatgtacaatattttacagatcgctcgttgttgcatccggtttgttctttcgagttgtcctttccactctcaaggcctgcgtcatgctcatgcgcggtgtttgcgtaggatctccccgccgttgttcctctgcttctaggtcgtccaccaaaaattgacctagctctccttgtctccatttctgtataaaaagaagtgcggctccatccatcattggcaccccgccttttgcgagcaggccagtttggcgcgcaaagctttcaattaatggaaccacatcattggtcggttccgaccagcgcttgtatactgatggatcattcaggtttatatgatacaacaagtaatccgccatggttatcgcggaaatgacattgtccttgacacagccacagagagccagcttgagcatattctctgcttctggaacatatggcataaacactcccggcgtgtccagaacgtagacatgtgatccgttctcacgatcaatgatcttcacctgcgtggctaccttgcgtgtgataccgggttgctgcccggttttcatagccttggctttgcccgtgcctgagttgcgtagattgttgatcagtgttgacttgccaacattgggcattccgacaactaacactcgacagcctactaacttatcgggagcttcggcgtcggttcgaaggtgcttgatgatctggctgacatcttgccgggaggacgagctggtgaaaaacacggcgctctttggatcaaaaccttgcagtttgcgttctatctacagcacttttagctgatatccagcagtggtctgttatctcactgcatagccaagaagaaaatacttactattttctgggcagatgatctgggagtgcttcccagatctctcttagtgtagacgaccagtcgtcgcatcttgcccaaagcttcctcaaacatggggttgatcgaggtcacgggagctcgataatcacgacactcgacaacatagtcgatagttgagagcatgcttttcatcttggtcagaccagccctgtggtgtcctaagaaataggaccgtggaatagccccataatgagggaatacattgcgcggaacgaactgggccattggagctcgttgaaggatagtgtttttcagtccggtgaaatatgattcatcttaatcggagcggtggatgatcagtctcaagggactggattgattcaacaaataaaatcgctggtccgcggaaggcaacaaaaaacccgtcaaaatgtccagggcggaagggcgggcggtgagtgaatcatgtgcagcaacttagggctttgcagacttccgtagtgcttcattctggagattcatgtttcctttttgcgcgagcatagctttccttctaattcaagctcaacagaaaacacaggttaggtcaaccctacttctaataataatttggcgcgtggtacgttcggctgccgagcgggagatggttaccaaagcccgccagagcccgccagagcccgtcgatgcttgccaaagcccgttaactgggccccctagatctctaccactgctactttttgtctaaagtgatcaccgtggtttagccgtgtatgtgacgcaaacagacaaaccccgaggcagccctgcctctcttgtccaaccccacccaatgtgtctcgggatttttcgttctacgtagctcaattgtcactcattttccacttgtctttctccgttttcctggtcggggtttccttctgccgtatgctccgacagcgtcaccctggaaggctcattgaccaacagtgtggtggctggtccacccaggaatcatacgggtatcttttgtatcagacttatgcaaggaatactgccagtattctcagagcacaattcaatttgaggtccaatgtttcaagtatctttctcagaatataatcttcctattgagcaacgggatcaaacacaatagtcaagaatacttcatttcttgattcgccggtccacgacagacattcgtaccatgaagagagggactatatgttgtggtttttccgttcttagtccgagatcacacctctttagccttaacccgacgaagatgtgcagctgtagaccaagggaaatgaccaacgggaactattagaaaactgttattgatatcagaaatagccgcaaaggcattataccaagccgaagacgctgccaaaatgccaaaaataccgcctgtcctctcaagtgcaaccggaatctcgccatgagagttgcattgaatgtgcgcaatgccgagtagaaggtagttcatgtccatgaaaaagtacagagagaacatcgcaagattagatttgagagtgcacaagagcatcagtgtagtgaagatgcaccagccctgtatacatacatcgttctcagtatcttttcccatgatagtaaatcttgaatttgatggaattggcttaccaacatgaacaggcccattaagagctcgttctgacatagtggatctactgtacttcttgtaaaatcggtatcgtcgaaagtcgagatcagagaaaatgatatccaataggcaccgaaagaacaaaaggtcgtcgcaccaaaagtattcccagccgccatttccctactcttattagcactaggcaacacacaaagcaggataggacataccacattccagccaacacctgcgctataccaccataactcaaagccaaggacatactgacccctgctactttcatacctcccacattgagggcgacacaattcgagaggaacgatgtcaatgcaaatgcacatagacccaggggagcgggattggcaatggtccgaacgttaacaggcaaagactgaagttccagtttgcacaatggtataggtgtctccggaatatttgatgggggcggagagtaatcacggctggcttgagacaccactggggagccaatcttgtcctgcgtactcggctggatgtgatggtttgatgcagccttggttctttggaccgtagtgacggtaatagtatgctccatcaatattttatatgaccaaatgctggttttgtgttttcgggaagccgtttagaggaaattgaggaataatatggccagtgaacagagaagaagggcaatggagatacatatacatatatatatatatatatatatagtctaggacgtagatggtacatacctctagaaagagcactcgaccttggtactatcccccagtgcacaagcaagctacagccaaaccccgttgaaatcgaatgatttcaatattccggaggttcacaaaagtggagtcgatttctacggggtttgaactgtaatccctcttccgcatagagagcgtattggattccccgaatccgggaaatatatacggggaagtcgtcgggattcgaggattagcattagctaataagaagcctatactcgggtagtgccgcgagaaacgggagctctatggcatgtttcactcgatcatgagatattcaaagactgttcccacaataatagagcatcttgcacgctgtgcactgcttaaccaatttattacaaattgctagcacgggtcaataccgtcgggatcgaaactaagaagaattaccaattacttcctatatacggagtacatcgtaggtatatgtgtcgttaatgtggggatgataacttgcaagacgaccaacgcactagaactgggggtttggcgcttggctacaagaattgacttcaccaaagtgcagtgatacctgtaagatataatatttgagattcaccaaaatgtatatgcaggctatacctaggctaggagtgccatacaacattggaggaaatgctaggaagttctacttgctccggatgtcaaccatgttgaatctgccggaggcttgacttggctatatctatattttgcagagcctactcaggctcctgtgtaggcatcgctcggaatttcaacaaataattgctatccagacaaaaaaatctagattgggtatcctggcttttataaatccatcatattgcgccgcatgtcatgaggaaagaagcagaacccccatctcacgacatcattcccaaaacgccacaatgcctgtggtctggaaccaaaaaaaaaaaacaaaaaaaacaaaaacgaaaacaaaaacaaaaacaaaaacaaaaacaagaacaaattaaagtatatgcaagatcagcagggaaattccttacacatcccaaggcgcacaagccttcaaagtaccagagcttatgcccgccagccctgcacaaaatcgtgcaagcgatcaatcacaacaccaaatatagcattgacactgtctgcgataagttgctcgaagtggcggatggcttcttcctcggtcatctcgagatggaagcgctccttcactttcaggacggctttatcaggctccactcgaatatcagggatattggcatcaaccatcaaactgaagaggttaaggatcagattggcagatttccgcagcgtggtgtaagcagtgtagcagtactgcttgaactgcagatattggggcgaggttgtgccgcccatgccttcgaccatttccttgcaaagtttcatcatgggcgcaaaaggcttcggatcacgaccaaggatgaacccaaagtcagcgtggaagaagtggccatctggtgctagaagcaggttttcaagatgccggtcgccaacgccgaggaggtacgtgataacgcagtatcctgcacatgatttgacgtatgtatccattgcttctttgcgaacgccaagaggctcattgtcatctgggttgttggcttgtagataggcaaggatggatttatacttggcggacgccgcggagagagaaatcgaggggatgaattgcacggcgccggccgttgcgctggtggcaagaattcgataaggagtcagtttaagatcaaggttctccttctgcaaaaggcgatccatcaagatgatgatctggatgaccaattggtcctggcgaagatcatcaccgactttgaacagcatcggataacgacgaccttcagaagtcttgaacgtgataagcaaaggggaaagagtggacttgaagacgttggattcctcggggtataatccaaccactgaaacatcgggatctaaaggtaggggcagcgatggatctatgttgatcaggtcgttatcagggtcacggagatattttttcagcatctcaatcttgccgactctgttttcgcgtgcgaagcgtacgtccttggctattttggagagcacagccaccatttcaccttggcgtaatagtgtctttctgtgctcaggatgaagcttctccagttcaaccatgaagtagtattcaacccgcgcaaacagccgacgctgaattgcatcagcgtcatcaaattcgaccatgagataccagtgtaggtagttgccaagcttgaagttattagccgcacgcgaaatcaagaaatgtgcaagcgaggactcctgcggagccgcatcaggttggttatccggagttgcgtcatatttcagagcttgcaccaattgaagaagataaagaagcaattcctcgtcatctgccttccgcagtgtttccacagcatacgaacggaccgcaggattatcaaaggtgggaccaagaatctcaagagcgtcgtcgacgtcaatctcggtccatttagggaacatttcaacagcttgccgcgattctccaacatcccgccagttgactgatttgacgaattttgtcaatgccttcttctcgcgtgtaagatgatacctgaaacgccacacaagatccttctcttcagcggtgaggtcttgtgtcggttcataggagataatcatattgagatcatccctgatctttgggttgggcttcaggtcacgatccatgatgccggttcgatggctacggatcaaacgccggtgcttgtcctcacacgggtttccgatttgaccaacctccggatcataaatctgaatgatattatggggatcggcgtttgagattccaggtccaaaatgtacctccggaactggcttgagggtagcattggggtgaggaggtgcattttggggccaggaggaaatgggcggaggaggatactcgtgatcggcccacacaatgggatgatcaaagcgtggaaattcgacgtagaggtcgaaatactcatcttcaatgttctcttcgtcagagctatcatcctgatctttgacgtgtttcggatctttttgtagggctgcatgaagttcaagcgcgcgcttttgagccgcttcatctgcatttgtcttcagtttctccaactcccgaaagagcaattgatccatccagtccacacgtgggatctcccccatttcgtgtttcttgatcaagacttcgactcgttctagttccgcttcttcgggtgactgctgtgaaggatcacgggtattcggcttacgacgcttaggtggtaaaacagatggggtagaggttgtagcagagccgtctgcgtccttgtgtaaataaaccttgcacttttgtctgcccattttcaatttcccgtcttcatcaaacaaagtgattgtagttccaccgaatgggacgtgcgtaatcctatcagcagcgagtggggacatatcaacgatggtgattgcgagctgagaattacgctcggcatccttgatagacatgggcatctccaaccattcattccatacgcgggcagttttgaaggccttgtatttggtcttcatgggcacgcccaatggcttcgactccgaccatatctgagcggtcacatagagatcggaggcggggtcttggacggaggcaatatgccgcagctcggcatttttatctagaacggtgcatggaatcggcttctgctttccctctaacgaaccactatagatgtgccggcatgagaaaaagcccaatgcttaggaatgtggaacttacatcttgatgcgtattggtatgtccacttgagtggtcacggcaaaggtgaacgcttccatctctgttccccgtttggagagagcaacaggtcgctgcgtcatggccgataagcaacccgacgtggggaggtcacgtggaaggtctacgcgacgcgacaaggcgttcgcgatcactaaatggagccacacgtctttttcctctatgtatttcgaggtatactctttgtctaaattgggctaccgtgtatagttgtactcgattagttgcccacttttttctttgttaaactttctttgttcccactctcatatcatctcgcactgactgctgatcgagtatggcacgtctcattcacacaaatctggacgaagcaaacaccccaggtcccggcccaacatcatcaatatcaccagactcatctacttctgataaagaaaatcggtatcaaggtaataataagagaactaccgttgcgatgccaccgcatgcacagggtaaacgacggcggttaaccgaccacccctcaaatacccagtctgctcgatctgctcagtctgcccgatctgggcagtcgcaagcatcgtctcaacgaaccagcagtgacacacgatactatgaccctgatcaggaccccgatgaacggagaattgtacggaggggacttcgagagctgggtagggagctaaatggtaagttgctttggctggacttgagactcgggtaatggtgctctaacacgtccacgaagatacgcggggcgagctcatgcagcctgggaatgatggtatcctcaatatagttgaacaagcaaatcaattctacgccaaagtgaagcagaccgccgacgccacgctcgattcgcgcatcctggtcaacaccgccgatctaacgcacaaaaaagccactcagctcgctctcggcgacacctctgctggtattgatgtagacgagtttgtctctaagtgtgtatcgttcatgcgtcgcggcccaaacaatgcgacggcttcaacacagggacgccgagggcgtcttggtcgaagccaaagagaccccgatgccagtgacgaagatgatgatggtgatgcgatgaattgggacacgcttggccgatcggcctgctttcctagcaatgctcgtccggccgtgtccggatggttgctggggccgctgtcagtacagaagcgtacgcggcaaatgacacagcgaagagcagcagaggttattgatccgtcgcaagccgtggcacctcgagaaatggcacagcaggatcttggtcaacaggacagcacaaatctgacccagatctgttccgagatcaacaagctgcttgccacgaggcagcgtctcagtcagcatgcagttgagacagagcttcgcaacgaagtcaatctcacaacagagaaagcacaaaaaatcatggacaagcatagcgtagcggacgacggaggaattcctttgtttcgcttctgtatcaacccacattctttcgggcaaagtgtggaaaacttgttctacgtgagcttccttgtgcgagatggcacagtgggtgtacaaacagatagtcgtgatttgccgaccttgcgtgagtatttttcaacatgactggttgatacagcactaataggttgacagatgcgtccgcgccgttcgcccccagtgaggcccaaaagaaaggcgtgcaaaaacatcaggcggtttttagcctggaccatgatacgtggcacgaaatcatcgatgttttcaagattaaggactccatcatcccccaccgaaaagaggaggagcaagagactggcacaagttggtatgtctaagcttcttctgaagacacgattccacgagtcgatgtgtgttttgcaagatacccctagatcttttgacttgtatttctcgatgaatttaataatctagctttatactttgaatatgtcgtattctgtggcatctagcacaatcacgagtgcgacctgtaaagacacaaattggaaatccacaacgatagacctatactccttacttagataggatatatgcccgagatctatttcaaaatgtaagccacctatatgtacataactacggagtacataaatacggagctattaagacaacaactatgtaggcctggaaccctccagggctgcccaggcgggccgtaccaccgtccactctgacaaagcggataactaagctcaggttcataactacgtcattatcaggctgtctggcttcccagcgaacttctgaagactgatccctactcttcaattgtttaatatttaagaattgaaaatttctctaatttgttactgcaaggacttgaagatctgtagctccaagacacatcaactgagacatccaacgccagggaaaacacaaacaaaatcaggaaagccgccaaaatgccacagctctttccagccaacccttcggcgactatggtaattcgccatgtgacaccagatatcgtgaccatgagtcttccttttgcacggttcggacgcctgcagttcggcgggcgagggacattgggtgagtgccgactctacagagccaacctaccaggcgcatgatacacctggggacaggggatgatgtgcagtgatttcaagcccatgggggtccttgtttaagatctatgctgactgttcttgcatgcgacagtcaagcttgccagcggctccctcgcagtattctctcccgtcggcctaacgtctgaagtccgcgagacagtcgagtccctcggcggaaacgtcaaatacatcacggcgccagatatcgaacatcacctcaacctcaccccgtggaagaacacatacccacaagcagagatcctagctccggagggtctatacgagaagcgacaatcaaacccggaattcaaggataccccgttcaagcacgtattcaaaaaggaggatcaactgccacggtcgatctcgaaggagttcgatgccgagtttgagagcgagtatgtgtatggtcacgggtcgcgtgagctggtgtttttccataagcccacacgcacagtcatcgaggcggatctgctctttaacctgcccgctaaggagcagtattccaggactcccgaagccgggactaatttccttaccaagctgattatgccgctgttgtccaccaagccaccggctacatggcagaggcgatttgcatggtatattctctcgtcacaggatcgggcggcgttcactgagtctatgaaaaggattgatcagtgggactttgatcgtttgattccttgccatggtgatactatcgagactggcgctaaggggatatttcgtgatgtgatggcatggcacttggagcagaagaatacgtagtcttctttatcgaaactattgtaacagatgatactttcattttgactcgggtgttgtggatgggattgcattggtgtgattttctttttcggggacgttgtaggcagcattattccaaatttgatcttctctcttggctctccgaagtgggtatgtatactccatacatattctcattcttgtcgttgttgctattcatagtatccatggcccactgataggtcaaatagtaaactttgcatcgcccgcatctttctaggatcttcctgtatgtatacgaatgttcattgctgcctagttctgctatttccacttctcatacgtgaaatactacctactatgtagtgatattatactcataaaaaatcgtatgtttagctgtcaaatctccgtttccccacgtcatagggctgagaggaaaaagcaagtcagatgactcaaattaaacatgatgtcagaggtttaaaggtctctacgctccagcccctgtcacaaggtacggagtagagaacaacatccacctgtcagacagcaacaatgatcgccctgggtggagcccaacccaaatcccggaccaaactactctgtagagctatcggcaatagtcgctaggatcggcagtcgaagagcaagccacggaagtatacaaagtattccagcaaagaaaggcccgtattccatgccagcacatcgggtggttttctagcacggggaggctgggcctggggaagacaaggatgacgatatggttaatttggtcgaaactgcgtggccctaggctcgactttcgtggcatttccgtctgctgctttaaccagccacaatcatgtatgtatacagctcccatcattgagaggaaaatcttataacgccccctcagaatgaaaaccagcgcacatttcttctcaattttcttacgcgcattgggaccaatttgtttatccttcacatagttactaacttctcaaaatgactggtttgctccaggaaccgagccaaaactgacttcaagcgtcagaccgagaaatcggtttgtccggggacactttgcggagtccatcaagctgggattgaatctgatgacaaccctagctaggtacaacagagctcgatcctaggcaactatagcataccactatgatcagtgatacatagtatacatagtatagatgaatagactgagaaggctatcgaaagcattcaaacatgttgagcgttagttaatatgagttcgatggttagtggtgtaaagacaccacagtcaagaccttgacctgcctccgtacaacatcctgtattgagggtactgtacatgtacgccttcattttcctgatggctctgtagggctactccttacgccgatcgggtggcgattggcattcagccacagtccacatcagcggtcagtccaccacgaaaagccgatctcttacccattcaagcctggaaaacggttaggcacgttttgttcacaatttcgaccaatcgtgacctctgcttgttggaaagaactcgctgtacgaagtatacgagattgatctgacgacaccaggaggcttagattgactctattggtcgcgcctaatgcaagctgtgctttgtcttgaattttaattgaatttcctttttctaatttattgacttttcacttcgtcccttgctttaaaagacactgtcgctccctctcgaggtttgctcgtctgtgcaacctaacacgttatatagcttctcgcgttccctaacctcttatcccacaccatatcttcacgagcttgacacattatctccttatacaatcacatccttccgatttatgaaagaaactgctcattgatctgacaactcaaaaatgcccgtcatttcacgcctcgcgtctatcatcctccgcgttgcggagattgcctttgcagctgtgaatagccctgatcaagctcaacttattgaccgcatctgactctgttctaggtcgtcgcaggtgtcatcggacactaccttgcccaggttaaccacagcggcacagatattgactggtggcctcagtcgcgatggatctatactgaagtaatcgccggcttatcgatactgctgggcctcatatggctgatcccgttcgcgtcgggattcttctcctggcctcgtatgtgctggatatacctggtgaatatggagcaatacttactggaatatagtggacatcctcatttcatttgcttggttcgctgcattcggtgtcctcgtcgacaccatccgccgcctgccctgcggcagcatctggtcctggcactttagaggggaccagacatgtggtcgctggaaggcagctgaggctttcagcttcctttcagccattgtctggcttgcttctggtatcgtggtatgtgatgagatgatacaacccacatgtgaatacggactaagaaactctcaggggatctggttcaccttccgtgttcgccaaagcacctctgacggagtgtaagtaaccaatgacatcttctgataatagcttcttgattgattgatactgatatactgaacagtcgccgccgccgctggggtcgctccgccgtctagatgttagcatcggatcttcaaatatctgcatggcagacggtagtccgtcatacactaccgattatgcgcattgcgcctcccgttcagcacaggataagtgacatggatgttttaatgatattcttgcttctttgttttcctgctttcctctaatgtttctatgtttgcctcatgatctggaggtcaacgaattacgacttacgttgatacccttggtgagataatctattagtgattttgtgaaatccggctattgagtttgctgttctatcgctttttttcatctattcttaatatatttcttatttggacatcattgtctggattgtacagcagctacggacgttgccaatggttctttttacatccacacaccctcatctagtttccaattcccggcccaaataaataacaaagaacaacaaggccatttttctagatctatcagtccatgtgtttcatttttcgtctttgtcgtctttcttgttttcctttattagcttttttattcattcgaaataataatcttaacattgttggaagtgcaacgtacgaaagatataaatacgccaggtcgagccatgatacgttatccctcgagccgaagcagtttttgaccatccgttcttgaccttcgagttaggaattcatcttccctgatcagcgttgccacagccttctgctggcttcggatttctgctatcactgagaagccatgtcagtgatgctagacaccacttcggcccggctctttcataccacgcgcattggatttcaaacccgctgccagcaactcattgacgacttccttcacgatggcttatcgcttcaggatgaattccatgatagggttgatcagctccacctatcattggaacaacttaagcgagccggacagatgatggccattgattgttcgacaaatgagcttgtggctgttgtccctattggatttttcaccgtcctgatcgagcgtcctggccaggacccaatggccgaatttgattgggcctgtatttacaccactgacactttgaacatgctgacgagtgagtcttttttgcgccacagggcccccgctgatattgcccgcatcctcgagacgcagtcattcctctgggatttggttgtgccgtttcctgtaacgctttcctgtgccgaggattccgccccagacccatatgtgaatgctcttcagatcccccccgctgctagtctggctcgtatgaactctcagattccggtgaggcctcgccctactcctcctgttgacacttacatggcttacaaccggcccgtccctggtccttatccccctgctttgcctccacgatctgtgtttgagtcggagcccgagtcggatggtgagtcccctacaggcgctaacgctgtgggtctttatggaaaccccagcatgcatcctcggtgaactcttgttattcctgtgttgatttccatcattcccagtgttcgagaaccataggcacttttcgactttcagtagcaaaagtcttgatcaatgtattgagcttctcctgccagaactaatggatgcggtggaaggctaagccacccttgagataattgtcatcctgaagatgtttctatcaccagatcattccaattcttcgataggaagctgtagctgtccttcatcggtcctctgaacgtcactagaagttaggtggacggatttgggcatccaggagcagggtggcaggaccctatgcgagttgccgtacatggtgtggccagctcattagttatcaatcccctagtaatagccaagcgtccttgccaacatccgaagacagaacaccgaacaaaatagagggcttagtgagttgttacattctcgacattgtagatagtctagtccacccgtggagcatacatatttactgatgaacacgaaactgaaacaaaaatgaacgccggaaatcgagaccaaggaataaaagcttggcctttcaaataatatgagcaagcccgtggccagctgaaaagactagaccatccctttcccaaatgcaaataaacctcattaaaacatccctccgtaatcaatgttgcaactccgagcaggattagcctgctaaacataaaccaaaccctccctattcacaaaaagcccttggtgttgctgggttgccgctggggaatgtcattagatccatagacaccactcccgcgacggcttccagtatcactgaaggtcacaccacgcccaataacactgcctcgctcaacgcgcagggctttccagccctccagctcgcgttccagccgcaatgctttctcacgctcctcgcggagatctcgctcggcgcggcgggccagcagctgggcgtccgagtcattatgctgaatctcctcgatattgcgaaggagccgttcaatcttgtcccgagctctgttgacctcgtcagtcagctgagtgttcaccttgtctcgcctgtcaatctgggattggagatccttgacggtgcgatcaacattgcgaagagagcgctgctcggagctgtgcttgctttcctgttcttcgaggtgggtctcaagctgaacagcagggttagtacggaagtcacagagactgagcatgaagccatttgaacttacctccttgatccgcttatgcaagaagcgaacatcctggctaccagaggaataactcttggtttcgagatcgagacaccggagttgggcttccttcagctgcttctcaactgctgccttctccttgaagagctgagcattagcctcccgctcagcagtgacctccttctgcatttcagttgccagggcgtctgcacggcgcatctttccaaccgcggcggcagaaacatcttcctgctgcgcaattctagacttgagctcaagaagctcgcggtccatactggcagcgtttcgcatagatgggctttcacccttggcaaggtcctcaagtcggtcgcctgcttcggccaatcgaccttccagcatcttcttgtccttcagaagcatatcacgctctgcttgaacatcctcaatggaggtccgaagggtgcgcacctgggataggagtgagacaactttactctgagcctcgttgtgtgcgttgacagcttcgtcacgagaattggtgacatcttgcaggacaacatccatccgagatttttccttagcccatgttgagctattgagaacttcgttgtcccatttgctgcgaagattctccagctcctcacggagacgagaagtctctccacggccattgagaacacgctcacgttccatctcgagttcgttgttgagagtagagaattctctctggtacttttgtcgggtctgctccatggaggtctccttgtcctcgagatcaatcgctcgctggttgcggtaatcttcgagttcattctggagacgttgcttagcctgcaaggcaccttgaagttccgcagcttggtcctccatcctagcctcgagggactgtgcctgtcgctgcaagtcctcaacaagcgcatccatctccttgcgctcagacataatctgagcgcaggtttcttcggcttcttgcccttgggatttggcgaactgctcggcgcgggaagccttcataactgcaatttcggcctgctcgagtttgttgaagtattcatcggagcgactcttgtacaacatgaggcttgactccagatcagccgatctcgaagactcggcatctaggcgaatctggagatccgagaattcctgaagaagctggttacggctaactgcatcttgctctctgccgacttgcagctcttgggcctcggaaagggcatcacgaagttcaacctccaaggtggctctggcgcgcttcaacttttcgaactgagccttggcatcaccaaattcagtcatggtttcattgtgaaccttgaggagtgagcgcctagattgctcttgtgagttgataaggtcatatagttcttcgtgcgatttagcttgaacgtcgcgcagggacaattctccggagcggatgctacgttccaacgatgaaaccttcttggaagagtcgtcgagttggtcgtgaagacgaccattctctcgctcgagaagctgcatgcgacggattgacggactttcgtcctgccatatatcggcggtgggagtagagcgtccaagctggctctggaggtgcttgttttgcatctcagtcatctgaagcttattctgaagttcttccagttcagcggctgtatccatacgcctttgataggcctgtgtgtccactgttcggtcggacctcgcggagtcattcggtgcttcgaagacattgtagcgtcgattgggagtagtagggttagaatatttcttagcagcattttcggagttcttcctgaggtgagccggggtacggttgttggtcacttcgttttggtcgatctcctcgagcaaagcgcgcttagatgatgaatatttggcgtcgagctccttcatttcatccccatgacgtcggcgcatttcagcaagctggctctccgctcttgcgtacttctcctcggtaaccccaagcctgttttgaacagtttcaaggacttgggccagatcaactttcttagaaaggtgtggctgaacagcctcccaggattgagctggctcagtagcctcaggctcgaagaccttgtgtaataggatcaattggcggtgtaagtcctcgatctctttgttcgccctatcaagtgtgccctgggtttgacgggtattagcttgagcttgattgcgaagttgccgttcggtttcgagctttcgattggcctctgctagttgcaggttcgccgctgaagcagccttttcagcattacgactggttttgtgctcgcgattgacctcatgattcaaatcctccaaactcagcgacaacttctctttctgcttctccaaggatcttatcatgacctgcgagtcttccaactgacgactcaatctcttggtctcttcgtcgagcctggacttttccttttgaagggttgtcaaacggagtcgattattatcactggccttcgagtttgatcgggcaatatcaaggttcttttgctgaatcttcgtcaagagtgacttgttatcgttttcggatgcagtcagcctgcctctgagagtcacgagctctcgttcaagacgctccttgtgctgatcatgacgcagacggaagttttctgattcagagatcgagtgcatgagttcttgaatccgcgctgagagttgtgatcgttcagtctcaacttcttcaagctggcgagccttctcctcaaggtcctttcgtgaacttgtcatacgctcctcggcctggctcatgatttttcgttcaatctcagcctcggcattcatacgggcagtttcggcgtcggtgaacctctcgcggagcttgatcaattcgctttgcagttctttcttagttgtttccgctgtaactcgtgcctccgtagcgcgacgcaagctatcttgctggatgtacatctctttctcgatggtaatcttagagtcgttgagggtctcatatttctgagtcaacagtgcaagattgtgctcggaaagcatttgcacgtcatctcgtgactggcgttctcggctaaggtcggcttgagcctggaagagatggtgcttgagatcatttatttgttcctctagcagcttcctactctgtccagcctcggcatcctccgatctcttattctcaagcaaattcttgaggtccgcagcttcgcgttgaagttgcctctgttcggagcgcatggcatctctctccgcttgtacctcacgaagtttagattgcatgttgtcgtggcgtgccgcaagggaaattttttcggactcaatgcttctcttttcttcctcgtggatctgaacgtcgtttcgaagaactgcgatctcgctctcctttcgacgaagtagttcttcgtagctagtggaagtactcgagagttcggcaatctgatcacgaattgacctgttctcttcggtgacatcgcggatttgtttcttggatttatcgagttccttagaagtatttgcgagtttaatatcaagatcttgatcggtcttcaacaatttggcttccaggtcttgaagcttacgatctttcaagctgaggtggctttggagtatcttgatctcttggcccaattcttgaatttggaggtcttttccagagaactgagcctccgtttcagaaagcttgatatcgagttccttgactcgagaatgcagactgttcttttctgactcgagttgctggatgatcaaaccggcctgttccagctgggtaatccgaagttgcagctcgtcgtcaattttcctcttcgcaaagaccaattcatccagttgctcttcaaggccttcctggtctgcgattgcaccggaaagcttatcagcgagctccacttctcggtattgcagtcgcttgaaaatctcctccttgtccaatgcaagtgctcgctcactttccaaagtatgctgtatcttctgaatctcgatctcagtccggcgtctttcttcgtccagtttgttgcgttcggcaagatcctgtttcatcttgatttcgagttgctggatcttgtcgtcacgcttcttgacttccttcgcatttctcgtgtcccccagtagcggcttcatccttgaaaacatgcgccaccaagggctccccttcaaatctaggtaagcgtggaagttctgttgaataatcctggttgcctccgcgcggtagaggcgcttgttcgaaatgcggcgctggacaaatcctcgtgccagagattgaaacttagacatgatagttcggatgagttggtcacgtttctcttctaagtcggccagaacacctgctctgaagaaaactttggtgcggccaaccctgtaccagccccgatccataccaagctttgccaacatagtgcgagcaatagtctgtccctccaagtaccccttcggcatatcctggcaaagaacctcataacgctgtcggaactctgtgaacggcaagcggttcgggaatccagtacgagcgatcctgatcccttccaggacaccgttgcatcggagctgatccaagaccaatggagcgtgcagcatcttcggacgcttcttatgattaggtaggatacaacggacgaaatgagggtgggtcaggtggagctgagccatcaagctagatagctgctccttgtgtctttgggcaaccgtgcggaacaagcccttcttgacacgactcctgggatggttgccaccatcctcctctgagtctgcacagtcagagaacagatttgctacgtgtggtgctttcgaggcggccaacaggcgtgtaatattgtcgttgagcggatctttgttcttctcaagccaatcactcgtgttgtactcaacttccgcggcgtaatgcgtgagaatgaagccctggttgagacgagaggcgtggtactttggagtcttgcggtcccaaaggctatggagcttttcggtgaatgatttgtccgtagctttgggcatcacacaatcttcatcaagacaagagaaaatgccaatggggttggtcaattcgataaggtcgattgttggctgcaggtcctttccgaagtcgatgaattgccactcaatctgctccctcgcatattcttcttgctcaagaacaaacatatggtggttaaagaattgctgaagtttctcatttgtgtagttgatgcagagttgctcgaaactgttgttgtcgaaaatctcaaatccagcaatatcaaggaccccaatgaaatagttatcgtcgctagccattgagcgaccaagctggccattgattctagcgacaagatttccaaatccgcgctcatagattccctttgagagggcatccagggccatccggacctggtctggtgtctggaccttctccacccattcccggccggccttcacgcgtggatgcagaagacccttgacaaaagcttcggcctcaataccaagaaggtagcaagccttttccatgctggagtatccctcaggcgccagagttgcctggtctgctcgcatactcgccttcgcaacactcacatttcccagatgcagaacagcagcgatagtccgcaggatacagagctgatcctcgtcatcgaagttcatcacatggaaagcttcaatcaacgagttccattcttcctggtcagagacacctacgatagagtcatttccgtctctcgtataggcgaaatcctcgatctgaaggtccgctaggagaagcttctcgcgtgtttcacggtcagcgccctggagaagctgatagaaaacgtgatagtttctctcgttggggttaggcttgacgactcttgatttctcgagcagataccaatcgatcaaagctccagagatttggcctgcgcgagagaattcaatgcgaataaattttccgaaccgggaggagttgtgatttcggaccgtttgggcgttaccaaaggcttcgagaatagggttggctcgtagaatctgttgcgaaaggccggtgagttgcttcgctccggaacgaccataaggcgtatcagaagtggcgacagcagcgaggtactggatgaccttcttcgtattttcggtttttcctgctccagactctcctgttacaaggatgctttgattctgtccctcctcgacaagattccggaaagcctcatctgccatggcaaaaatatgaggtctggtctcctctctcccgcggcccttgtacattttgatgtactcattggtgtagattggtagtggacagtacgggttgattgtcactaggaagagtccagaatatgtctatacagtcaaaaagtcagttaaaatcacggatttgtgcattttcctgggcgtgacgaacatatattaggtctgactgatatctggtatgcaggttatgcaccacagacgcctcgttcagatgtgtgagttctgccatatcatctgccttgtcaaacttggcaggattgactttgtcgacctggtccgcgtctagttcttgttgctattctagtgtcagcgcattttatccttctcatgggatcacatccatacatcaccatcgtcggtctgcaccaacagtcgccctccttcaaattcttccagaaccagaccccggacaaaagccttttgagggtctcgtatccacacatatttgttcccagaaaagtcattatctccttcgagtccacgaatttgatccgcgccccgtcgtagttcctcagatttaatgaaacttggcgcaaatgttccggaggaaggactattctttgcggaattcgatcgctcgcgatttccacttagggataatgatggcgacaactgtgagacggacgtgttgcgcagatgacctctcgctgactccagcgcattcgatggtgtaatgatggccgatttaggccttgtatgtggggaatgtgttccttgtgaagacgatggccgtgcaaatagactggcacgctttggcgagccgttcagctgggagggaagcatggtgatcgtagttcaatgggacattatttgagcgtagggatcgttatcatagccaagattatttccacaatcacggtcgtaagtgtagtggaagtgagagtaggagggcactcgagagaggaggtgtcaaatagaatacaattaagagaggtgtgaagttggcaaaaagttggaagaaaagtaagatgttcgaagtgacgcacccgaatgtccatgctgtttgtttactctgcgttcctcgggcgcccgccgatctaaggtggcccgtgcgcgcgtcacgtgagatactcgatcatttttgtcgatgaaggcgcttagaccttaaaagacgaccgcgtatctcaattcttctcgagttcaacacctttattcatcattctctcgtcctataagcagaatccacagtcgtatggctctttcttgtttctaaatcgccatcagatcattatcacccctccacagtgactccaaattgaagttctgcgtatccttttcccaaagacctaccggtacctctccacctgtttaattcttcaagacaacatgagatttggtctttgaaattgcaacctttcttgaactccagcctctcgcttttgagaatcgtagagaatatatctctttcatccctgcacacaacatcatgtccgagcaacctccctcatacggtggccattcaagctatgcacagcaatggcctcctgcatacccttcgatgattcccgcgaactttcccagttcagagtatcctcaaatgcatcagccaacggcgacgaatcatgggccgaccttcgactataacatggcaagcgtcaatgcgaattcgcgagttccaggttcaaatggtgctggaaacttagcattcattccgcctcagttccccttcttcaaccacttcgatgcatcacaatttccacctcatttccctccaatgccgtttcctccgatgagctatccccctatgccaacagggtcctcacatccccccatgccgtatcatggtatagacggaaatgtcacacaccaactatcaacgccagctgtacatccgaaaaccgcccaggttcagccagataatcaccgcgaagaaggcgaagttagtgagggatctgatgaaaggtcactacaccctacgacacgcaaggctacgcgccagtattcggacctagaagaaggagaaactatatcttctagcgcgcagtccgttagaagtagtcagtcacgtattactcccatgattccccgtgttcagttatgttttactaataatggtgcagcatacgaccctcctttgtcagtctcagcagacccaagcttagttcaccgtgcgatgcagcctcagcggcaagacccacccgccactgtcccagcccctccacctcagaaatcggccgcgcagctacgaattcaggcccaaggcgctttgcttagcctggcgccacataatatccggtataatgaactggtcgctgagggcatcaaccctatgatcttgaaacgcctttacgaggaagtcggcatcaaggtcaccacatcatctgggcagtctccaccagttcctgagaaggcctccgccgtggctgcagttgccagcaaaggactgggaactaggaaaccagctgaggtgcccttgccagcgccccaaccttctgcccctcccgttgcccctcctgccaaagctggcaaacctctggagcgaaaggaacttatcgcccgcatgctagctgagaaagctgcgaaggtgacctccaaagaggcttcaccaaccggcagtgcaaagtcccaccctgcgatacaagttgatgaaccccgcccggttccaaaggaaacacttgtaaaggagaagagcaaagcccagacggagttggcaaggcagcgaattgaagaactcaaaaaacagactttactaaagacccagaaattggctcaggcaaatctgccgccgatccagttagaatctccagcgccagctatccaacacccgctccctcttcgacctcctgttcctgaatcccgtcgctctgctgggcttccaggactccttatgactggattggagcaggagccacatgaaactcttgccgctgagccggtccaacccataaacattgactcaacaccggtgtctcaagcaacccaacgcaagcgacctctagcttccgatttcgatgagccagttgcgcctacgaagaagcatttcaaccacgctgcgaataggttcgaccctactgataagctcatcattgcaattagcgacgatgaatcgctctacggtgatgatgaggacgatgacatggagttggattcgagctcagaacaggaacaagccccgatagtgacctcggctttggtcaagcctactatccaattaaatcctcctgtcacccgggcttcgacggctacaccacaagccccttctagtctaagtgaccaaggagacattcgacttaaagatatggaaattcaagctatgcgccgcaagattgcggagctggagctacgaaggaaatcgaagctcgctgccagtagagcccagtcacctcgcaccctagatgactctggggcatcatcatccagtggacaatccagtgggcaatcaagtggggtcgctgcttcttctgaagaaggtaaagttctttctatctcttttctctctctctctctctctctctctctctctctctctctctctctctcttgctatgacatgttcattctcaagtgctttcgagataaaactttgcgtttcaactaaccattattcagattcttcaaagacgaaaccgacaacggccgcacctgatatgattatgcccgttgcgccccttgcccaactggatgcactatccgaggccgctgccaaccgagaaccgctggaagaagcctttgctgaagaagtggcaaatggtgtaatcgatagcgccgcacagacatcggcttcattcgagtccgattctgctaggtcagctatgcaagaatctgatgatagcagcagtgatatttccgattcgtccagcgagagtgaggacgaacctactacctcgccagcgcaactcgatgtcgaccctgctactgtgccgtcattctcagagcctatggagattgactcttcagagcgatctgtatctcagagctctccctctgctatcacccaccctagtgccaattctgccgacgaacacgtttcccaaaatcagcttagcgaacaatctcagcgtgaactgtctgcggattccgacggttatgagcccccagagcctgatgctgacgcacagtctgagggctccagttacagccctcctccattcagtccagctatttccggtctcgtagaaaacacaggagtttcggcaccatcatttgacttggctcaagctgatgaaaaactaacaagcacacctcaggtgtcagactcattacgtcggtcggatttgcaggttggcgcttctggcgtatgaacactacccttctaaaaaaagtttttggtgaccccatactgacccctatctagactgaaacatcgtccgccatttcggagcaaagattcacgccgtacactagcccactgcgaaccttcaaggcttatcgataccacccgcattatgccgccgacgttccgagtggctaccgctcgctaacttacagtcataatatcgattccatgaaatacatgtgtccatatgagttggccgggggtgtctgcaatgaccgatcctgcgagtttcagcatcttcgggacatgactctaagcggtgcgtcgacatgaacaacgtgcaacaccccacctcgtcctcgagctcccccaccggcgtattgcactatctagtctgtttttactttctgtttattgctctactgccttcgtctctatctctgcctctacttccttcccactcattgccgtgtcctttttgccctgttcgaatgctgaccacagccgttaacctcgacagacgacaagattctcgtccagatgggctctgtccgagagggtcaaaccgaagaagaaaaagaaaaatatctcgctggtctgaaagagatcatcaacgacttacggcgtgacaaggtgaaagatttcaacactgtggcctccgagatagccgcataccgtaggcgcttcctccaagacccgtcgcgtgtcttgtccctgtaacattctcccaccctcattcattggaccctttcagtgtcctcttcaggtgagctgtcttctaccagtcttgtgaacaccaccatcgaagttctttcgatggtgggggaaaaacatcatcacaccacatggactcggacaatcctcatcatggccatgacgccatctacactattccatgccaccgcctctttttaggggtctcgcgttcatgacctggcttttcctctgcatcattagccgattcggcgttttcttccctgcattccaatgcatttgatctacgcgtttgggggctcgcggtctttggggtcacctttctttttccctttttttttttgttgaatctaggctcttgcctgcccattggacccgacaaaaacggtgttagggcatctgcatctcagctgctggtcgtaactttggcagtttcggcagtctctgctctgaggcaactctggctactgctaatctgccaccgaagggtgcggttgtaccattagaatctcggcagcttttcgcggaacatattcatagcaatcagtcaatatgtatttttttctatccaaccattgttctttttgtatcttcggtagtaatgaagtaagcatgacctcgcaactggcatagattgcgtatgagtaaaaacacgctaaaaccattaattcattcgattagaacatatcgtgaagtaaaatagaataaacccttcagctcagggaactccacaacccaaatatactgcagatgcatattttcagccgtgctcaactgagctgagaagagcaacaagaaaaaaaggtcaaatccaaaagccaaatccggaggaaatacccatttcccatacaaagtgagaaaaataagaacaagaaacaaaatgtgggttcctgcggctggtggatgctaagtatagcacgcagagtccggtcggggagatggggccagggctggtgtgacagtttcaagatttagatattcggagataataatagtaatagtcatagtgtacggagtcatagagtatggtatacggggtgatatttttaatattatctctcttctaatcaagaatgtaaccatgacatcctgtccctattccagaaacagatctatacgagttgactcaggacaaggcagatctagcggactaaatgtcttggattcgacagattcttgctgattggtccggggattcctcgttttcggttatgttcctcttcttgtatggacgtacggagtacatcgtaggttcatggccagcccgagatagatcacgcaccctgcgcccgagagtgaagtcagtgaccgggcgagcattgaaaacctaaggaaaatgccaagcgaaatgctagtaagcgggatgagttgtggatatggcagtaatctgcatctttaaggatttactgggatgacaagcgcgtccatagaaacctggaagggaacccaaacccgcggggcgcacagtccagcacagcctcaacgtcgagaagggaaagtaagtgcccaggtgggggctacgacaatgactaagttgggagctggatacggggagagtgggaataacatcatagagcatgccatagggggctgagtctgtgtcagagtagagacataagccctaaataataggtgaggactaaaagggtaacaaagatgcaaaggccaaagaagcggagaacaacggggaatagacttcgtttgtgttagcctccgagaaccaagaccgcttctctctgtatgagccatagggctgtttgctgcagatgccaggctcaaggagcggtaacaagaaaagaaaagaagctagttcatcctgacatgcatacaaagtacatcacttagcatatcggggtccattttcggctgagccgcaaatcatttcaaccaaccatgacaactggataattcgaggccgtgcttagaacagggggttgctgcacgccgtgaagatcacgatgactctacaccttggcatctaaggagaaaagaaatgtagtgatgatattgatgctgtatcaaaatgagatgagagtgaaaatcaaaatcaaaatcaaaatgaaaatggacaaggcagaacagcggagaatccagccccgctagcctcacgctaacccaaatcaggaacccgcaagtatacaaaattctagtctaacaaaacaaaaaaaaagagaagcatttacaccaggatatatgcccatgacccatgacccatgacccgctttgcacgctttgcataaaagcattccagaaagaaaaaaagaaaatcatccaaaaaaagcaacagagttcggaatcactatgccgagccgtcagcttcaggaatcaccgaaacgctgagtgagcatcggagtcacttaccattgtactcgtagtacccagtctcggcccgcaagatggcgtttcaaaaagtctcacttgatgcgcttgcactcgctgcaggcaatgtggctgcattgaacacactggggctgatggttgtagactttaggcccgtctccgcatccacagcagatgtacatgtaggtggcactgttgtacctcgtccctggtagtggtgttgttgagaggtctgtgtagtcggcacgccgtagaggccgtagaccagggaggtctggtacgactatgggcatggctgtggtcttcaatgttggtgtgcgaggagagtgcacggtaacagcagttgggtatgcagagactggattgcagtcgtgggagtgcgagtggacgctcatattgttggagaccttgtcacagatgcagcgagagcaacggggctttccacactcgatgcaggccatgtagagggcggaatcgtgaggaccaaacttgcagtcgcagcagtaccacaaaaaccccattgatgttatgggctggatgaatatggattgtattggtggccgagacagaatggaagactgggtggaaagcagagtgtccgattctttatagttgtagagcgggaaccgtgtctgaactgatacttggatgctaattgagtttgaaatggaattggatttcaagcctggggatcgtgaaagctatatacctcaagaatattagaatagatgtaacagaaccagaagcgcaaggcagcgttcctagaacagtcaacagcccaggctgccttgccagatccacatcgggttaagctaaattcattacccgggcagtaattggggcaatggatcaaagttgaccttagttgtacatcatccggcgagatgggttgcccaagagagtgtggcttagtgtaatccggggctgtcattgcccaggacaccacagttgcgcctagaatgtgaggaatctatgaatcatatctgaagaacaggtcttttgagtcaacgggcccactattccaggctaagcaaatgcccacaccgtctccaatggcctggcttaccccgagaatgtataggcgtcaacgggttctggtccctcgggtgcgccgaactaacggtctaccatcaggtcggatctcttttgggattgatgccttggtatgtaaatgatgttgatcaattggtttccaaggtgtgatatactccactccctcctagttttccaggcaccggctgcttcgaaaagcaaaacgaagagtcatcgagtcaggtgttgtcgcgcccttcgcagtgttgcctacgcaggctttctgacagcctctgaatatgaagaaaaatcagtttcatcattgtcgtttagggtattttttttcttacgattaacagattacgagatgctgtgaaacccgaaggctgatttctaatctaaattctcaccccgtgggcccgtagaaattccatgccgtgtgccttcctagatactatatcgagtcatatcgagtacaaccgtagcaccgtcgagatctaaaaagagattagagcatgaggtgatctgacattgctcaccaggccctatctgacggtcgcagctgagatctacagaattagcaatagtaggcccgacatttcccgtatcaacacggtagctgaggtcgttggtgaaaaggcaatatggggatgtttcaaggttctcccgatgccccgatccatgggacccccgaacgggcaacgaaccttgggaccccagggacacggacacccgggcgcctgggctccgattacgtcaggtttgcactgtttgcttcaacgacttccctgactcgatccgtccttgcaatccaccgaggtcatttagacatttattaaattcatgcatttcatattgctgtattgactccgtatttatggcgtctcccgcgcagaagcgcgtcaacgtcgtggtatccaggctcattccgcctgtgttactcggcgctgtcatatacgcttcttatgcggtcacgaaaccgttatccagtgagttttttgcgaattcggtcgcttttttaccaggaaactaacaatatgaaccccagtcgactatctaatccatcccttaccctcctataaccgaggcccacgagtcggcgctggcgccgcgatcatcgcgatctattacgtccttttaattcccatggtcgtttcttatatgcgactctattatcaagtcctgtggaatcccggataccttcccctcggtgaacaaaaattggccgatgacgaaagcataaagcaatcgaagcgccgtgggaagaaaggcacacgcaaagccgatccggagaagacaaaccaggcagacatggatgtggaaaggggctcaaactccactgctgtaggcaccgccgtgcagtcagatattgggttggagagcttctacgctaaagatgtcttcgtctgccaggaggatggccggcccctatggtgcactacgtgctgtcagtacaagacagaccgggcgcaccactgccgcgaattaggtcgctgtgtgcgcaaaatggatcacttttgtccttggtatgatactccctgtgcacataccgcaaatcagtatccagctgacagaatgcagggttggaggtgtggtgtcggagacatccctcaaattcttcattcaattcgttgcttatactagcatattttgtacctttgttcttattgtgtccgcttattttacagcggagatccgacgccaggtaagacttccacgagccatatcaattctccgcttgttactgactttcgaccagaccggaggagcaaaccctcattggtgtgtctgtattggactgtaagtgcccacccacttgatactaggaattgagcaagtctgataaaaaccaggagcggccttttcgccttcttcaccgccggtatgacattgagctcagttcaaatgggcgtcgccaacatcacaacaatcgaaaacctaaatcggggcagcgtcgtctggaccctcgccatccgtgtcccagaatacctcctcgaacgactctgggcagccgagtccccctgggctccgacattccgcatggtctcctacccactacaaacatcatcgtctccaacccagctgcaaaccacaatcccctctccggacgaagacgtggttccgggcgaacgccacgtcttcgccatcctccatactttgccgggccagaatcccttcgacctaggcagttcattgaaaaatctccagcagatcatgggatacaatatcgtcgattggctgctgccgatcaagcagagtccgtgtgctgaccatagtagcatggagagttattttgccctgggtcccgtggtgacccgcttgcggcttgaggctggactaaccccgcccgaaaccggggctgttccgcaatccccacacccaggacgtaaccaccggcaacaatctcctagtgatcaatagttcggggcgcttagggtgcttcgtgcgtgttttggatactttataattaatgcaatgtatctccattaatgatgcactattggccggcctggctgtgttaggatgatttatattccgatagggtgatgccccctgccgggcaactgtatggctaaatgtcgtcgctatcacgtacaggcctcccaaggtcatagacatcttgatattagaaaggtgagccatgagatggcagacaaaccaaggttttccgcgaaaataacacgtttggagcgtttaactcggtgatctttactcaatataagtaaacaaatcctgacttataactattcataatcgatcatttagcgatcactaatattggaatgagagaacatatgaagtctgcatgtatgatatggcagctttatgtgtggtaaatgggatatatatatttggttattccagggtatcctccgattccagacaaataactaagtctctatatcctgcatcactcattagtattcgtatgtcccgtttggacagacagattgttgacatcagcgacacaatgttcaaacattatccaggatcagcacgagacaatcgtttacagtatatcgcctaacaccctaatatgccacaatgtcccgcgacaataaacaaacagaaacagaaaacataaaatgaaaaggcaagaaacgcacaaaaagagaggaagaaagagacgaaataaacgcaaacacaaccctaaaaccgcaaatctctatctcccacataatctatctccctagggaacaacctctgtgccacagaagtcgcattcaacatgggagcaaataggacatttcctctctggcgccaggttgggattgactaaattctggcacttgcagcacgtccaccattccggcaccagtctttgggcgcttgtcgacaggcattcgggtgtgggagtaagaacggatatggcatccgggaacggagccagagttgagtgtgcgtgagatgtcagcgtactgctcatggaatcggcataagaggaattgttaggccgggtgaagtgccatccgtgcgaaaaaggagttgaattctgtccttcactgttggtcccggtattcgaggatttgttggacatagcgttggacatggcgtgggcagatatagtggctttagtgtggaatagaagaattgattggcaaaggagatagtttgatctatgggggtttgatttgcgaggttctgaagcttttgaacgagttgattgaataagttgattgaaggagtgaaactgtagatttaggtatatcaagccaattgagtctgattgtatgagaagcagccatggaagactcactcttataatgcaaatggcacacacagacaccatgatcagggctctcattacagcacccaaggcccaggtatagaagctcacgcgaaacccgaggtgaacagaccagagtcaaacagccaaagagccacaactacagagtcgaaaccccagcatagggaacagaatacccagcgggcaaagaggcacagcaaacagcagccggcagtgtttaagcagcagtgaagcgaaagcgggaccagccagagcgagagaaacagcatggctccacgcccatatatttgatgtggaaggataacacgcttacaacctcatcatgacccgaacctctctagactacagtgtgtacctagtcataagttacatagtagttggctaactaagttagtcagtaaacatatgactaaaccatgtagatctctggtattcccggatcccgacgcaaaatatcacgccccggtgcccgggttgtgggttgctaggcgcaatgctggctgggcactacccgggtcgcgggtggatatgtagatatagggcttctattactcgatggccgggtggagtctatactataaaagctgggttattagaccttgaatggtagtacatagcccaaattggatcgtgtgggtttcttatgcggagtctgcgcctcggttggggcttctggttctcgttcctgcggtgtacgagggtgaatcggaatgggggattcgccctgctcagtgggctcggttcgcctgttcgcccttttcaatagcccttattcgttgctttgattattgtggatgacatatcccaaatatgtgcctttgtcaagatagtgcaatggatgtcatgtccagacaaagccctggatgtttaagcaagtcaaggccattttcgagttgcctaaaccgatcgatattagggtggttccatctatgacctcattcccatggagccaattcggccaattcggccaattgcacagcctctatactgtagattaattaagttgggagcaaatgttaggtataaaaaaagcataatccaggggatttatatccacgtttccccctcgagatttcaaaatacataactcacaactttccctttgcggctcaagtgagatcacaaagcacctgtggaccccatttctaaaacccacacatgtctcagattttgcccgaaacagaaatgaaagagagcattctttccgcctgtcggggttgtgttttgcatatgaagcaagggagtttcatagttaaagagcgggaacaacacatggcatccatggcatccatggttgacagcttcgagttcccaaggttcacgcctctagatccatggaatcagatttatatacatattcttatattattcttattttacatttgccttctctttcatctccagagtccacctgggcaacttccttcctcgcccactcagcccgggaaagccttggcgttattagtattactaaccttttgttcaacctgtggatccccaacccacttttgcgtcattgttcacacctttcgctttaacacacttctgaatcccctctttgattgttcagttgggcaactattgggctccaagcttcgtgtcaagttcggccccgactttctcgactttgtatcgaatcttcgcctccgagccaaccagttgggcatttctacatagcccgactcagattgtttaattactcagaatctcccgaagccgaccagagaacagaccgtcacacctgatttcaaccggccaagcattatcatctgcacccattgaatctacagttgcatatcgaaatgtcgagtcgctaccggaatctatctcccagccgagaccgacactccctgattgaacccatgagagcgtcaaccggaatggtagaactaaactccttctacgacccttatgatgcacccaggcgctccgactacgactacccgtccgatactggatactccagtgctttggggtaccggtcagggcgaccatcgaaactcgaagcttaccaaatatcctcccatcgagttcttgacccgagtgcgtccaccaaaaaacgtaccgaatacagcatccaaccccgcaataggcacagaagcaatacagcaacgacagcggactaccatacaccagttcgtctggccgtaccttccgcatctgttcaacatatctcgccggtgcgccactcaattcagcgccgtagcccgagtcctctggctacagattccggccatcacatagtctcggcttcccctcggaaccccgcacatcgccggatctatagcaccgactatgcgagcgacacgggctatatggatctacggaatgatcccagacctaggactgatcatagtggtcatcaacaccgtgtccatccgcctcgtgcagtacgccagccagcgtacgatgggctaaggaaaggtgatgacatcgatgactttgatgcctattcatacaccaacgctcgtgagcaattcgaccgggactacccggtcaagccccgtcatcgcgggccgagatactcgcccgatcggccgctcagttacactggcgtggaagaaagccctcaggggaaatcgcggaaagaccgtcaccgtggcccacccccgacatcctggggccttgacaagctcgggcgtgaacggccgcgaagctcaacacacggcaaggataatcgggacccgcacagatcgaaggatggatttcatgatcaagccctggtcgccgtacctcaagactctgatagcgaatacccttctcgtcacgaggagcggcgccgtcgtgtccacagagcacgccacgtgaacgatcgggagcaccactatccagaagaccaccatctcaagccacatgatgtcggcacggtcgctaatgtaggacttgggacagcggccttaggaggcgcatactccgacttgtcggactacgaaccgcatcgttcgtcgcggcggaagcacagacgctcgcacggtggccatgatgccgtccagcccccatcgcgggagctggtagcagcagttccagccgatgaaagaaccaagcaagcctacctggaccctgccgatgcccatcgccacggtcgatcgcggcgatcctccagccggcgggcgcacagcaatgacgccgggacatcggacgaagacctgcaaaactacaggcgtgagcccgcacgtcgcacgcacagcagcaccgacactgaaagcgaccgggaccgctcgcgccatagagaccgagaccactcccgcgggcaccgctctcgctcccgccgcacgttggagaatggcaacgagcacatggccaaagatgaccccagaagacttattgctgttgatccacctgctccaaaggagccagagggtcctcccaaaggaattctcaagcctccgcgcccggcattcccagaggaacccaatccggtgagggagggggtcgctcccctcaaagatgctcacaagcaggggatcccgccaggagctcgctggacgaagatcgaccgacggctcgtgaatcccgaggcattacaaatgggcaatgagcggttcgaggagcggtcggattatgtgattgtgttgagggttttgagcaaggaggagatccagctgtatgctgtgaagacacaggagatcagaggtaagttacgctgctgtgtatatcctgaaatcacatttgaagtagaatactcaccattattgcatagatacccgacacaaggaacagctgcgcgagagacgcaagtccagagatgagcatcaacgccacggccgccgaggcgacgagtcctccagcgacgacgaggacgagggcgaggaagagccctggaagcagctcgaagcagcccctgcaccatccgcacagaatatgtccttgccgtcgcgcccacgcgcgtcgaccaactcaatgcaggaggctgaaaggcctcgggtgaacaattcgtctgctgcaccggcataggaaaatctttcgatagctcgggatttgcatatccttcgcaaggcctgggactagaacctagtccgttgagaccaaaatggcgttcgcgaagtgtacaggggcgaggaattcgtttgttttcatgttggctttaacaaatgcacctatccttctgggacgaagaccatgcgacaagcccctgcaggcaaaagcaagtacccgtccaatttacgcgccacccactgtactccgtacaaacgcatctcagactcgagtcgtctctttcctcttccaggttatttcaacttacaccgcctccacaaccatcaatgactgcattgtatgcactccgtacgcacctgtcatattggttgacaggacgcccaagatcaacaacgcctgcgtatgcagcccaacacgccgctgggttctctccgatccaatcaggcccccatcttccattccggaacccaacgatgatcaatcgctaggcaccgacgcccgcatctatagtcatctattggactgaatacaacgaacaatagtctggcgtcgagtcgtgcggctcggacggatcgccgtgtccttcccttttctttcgtcttctgtgtcactcacatattcctggatcagtccatacagtggggtctgcagatgtagtcatatcattacattatctcgaggaagagaagataactagtatagttgaagctaggcttctctacttctgaatatttacttctttcgttggttggtatgtgcagagagcacaagagcgctaaggaaatacaagccaagcgccctttctcaaagcgcaggagggggaaatgtcaagcaaaaagcaaataagagccacacctgcgaatgcaattgtgtgaagatgcaatgttttctttttttccttttttttctttttttctttctctttcattttctacatttgaagtagtgtctgtctaccattccaccagggatcatccaacagcgtctaaatccaaacccttcctattgcatgtctgatcgtcgaaaaagaaaacaaactactagtcccagtgaggaaacagacagaaaagcagaagtaaaatggggaggcatttactccctagattatcgtagttgcataggggctgcaggttctaggcatacgccactagcaaagatttaggctcttgtcggatttcaccgacgctcttctggtgatagcggggatatcgattggttattaacattataatgaagcataaaatcgcacatctaactacagacttcttaacgggttcatactgtgcgggagtatccggagtaaagcaaatacttccaagttcatactgtaccttgtacatatttagtcaagattatatgttgtaaacaatattaaatgaattacccctcccatgtttgttcgaggtcgtcccacctacttccccttgctgtagttgcaatttgcccagtgaatagtaatagaacagtaagagcagaatatagggatggacgtatggagtactccgtactaagggttacaatccttagtactacaggtatgtacgcattgcatcctagcatcgatgactgtattagtgttggttaagtactcatagccttttcattccgtatagcgtacacgagcgcctgcccaaacggttatagcaaagttaatggatattggatcacgtcggagacattctcatcacatcggtgtcaaagtcgccgagattatgggtggtatacaaagtatatgtctgtagtatgcgtcatttagtatgcctcatgtaaacaacaactaaaggccaaggctaaagctaagaagcattgtacatagtatgtcgtatagcgtcattgctatgctgcatactggagtatacgattcacggtatacgatgtagtttccattgccgtgcaagcggtctgtggatgtaaaatcacatccgattcgaggaaccgagatctatcgaggtaaccaaccgcccgagcgttgactgaatggacgagccatctagcgcgagtcatgggtgtggcgaggggtgggggaaacgggatctcacttggatgaagcgaactctgggtaatagcgtatgatatatgatagctaagctaccgagtcttggtcgatctcgatatgaatcaaatcaaggaagatggagagctggtttggctcagagcttgactggcgggaaggatcttgttattacaatcaattgctttattgtccatatacagtgcttacctccgtcttgaagatgaaacctaaaggaacttgctgatccctaacacgatctcctaacgtcacgacgcgatttttaatttctaatcctatccttgtttttttttttttcgattactccgcaactccgtattccatatggagtatctccggactgagtatgatatcagtccaatcgttaactaactagttactttagtagaaattttttatattgcattgacgccttcgtcttcaacatagtacaaaaatcaagattggctgactaggtgtaagtgcaaccatcccgaactcgtccaagatcgtcgtggcacatgggggcaaaaaagtaaaaagcaaatataaacgcgctcacttgacccccctacctccgcctccgcctctcgacatcttgacacatctgaccttgacccccgattgtgtcattggattatcaatgcggccggggagaaggactgaattagttgcgatctactctggacccccggcagtgatccagtgcttatcaccaacggagtatacctgggcttattataggaggaaaagaacaaattcgttttcgggttactatcattgcctggggctctgacgttagatacgtgggatatctacgatcagcgattgaatgttgcattgcgtagacagttctgttcattcggtgtgatttccaggcataggaccggtgtgtgtatgtatggtaattatcatcgccatctctgcacagcctccgggatttccgtgtcttttcactgatagtaaaaaatttcaatttttggcattttcccacgcactcccagcctcaagatagcacagggagagatctgaaacaattcgctccggccacgcgacgggttaccgcgcccacatgcaggtttaacacatccctccacatgggatggctcacaaagatttagtttgcggtgagaactaacttttgggtattttggcttttgcttatggttcggctagaaactgtttcgaaagatatatgtgagagacggactgaaactgatatattaactatgaccacatattgcagtcggaaccggaattgtgaaatacggaatatggatgtatttaccacctttgcccgttgcatttccattggacgcaaatgatacaatcgctacaccaaatccgatcagggcccccgggttacgattccccgattgcccccagcggcttttggcggctggggccggagaacggagtaggccggtgtgataaccttcaacttatgccggacttgcctacacaaaagtcagagacgcgagacagctcggctaaaaataataataaatacctcatcccacgttctaagctctattcttcggatccggatggtggggccgttaaacgatccatcgactactgaggtagtatgtatgtcgcgtctacggtggatgcttgagataatagtgcgaagtacggagtacaggtacacaatatacaataatctacagtgggaacgaggtcgtagagagccaatgcaacatattcgagttgtgcattcttttggacttttggagggggggttatcatttcctcttctcggcgctcatcccgcttggtccgaagggggggccatatccgtcttagggcgatccgatccggagtgcggagaatgttttattctttttattcttttatttttattctcattgactataaggaaggaaaggaaaaaagatataagcattaattataggctgattcttcaagggtataaagacgttacaagccctggggcagatcattgcagattaagcagactaagcagggtggtcaatatgcgcatagatggaagaccggggtgtgccaactttaatttggcagttgaatcccggtcgaaaaaggagaaagcctttagcctgggcacctcggcatctggacatcgatggatccacgcagccaaacgtaaccatgggcgcccgccaagcggctaagactatcaagacttgaagctgactccctggctcgccgctccgtccagctcaacccgcgatctactagattgtggcttgtcgcccctcaattgccccatgtctattggtgtacccatgtttccatttccatgctcggccgagcgttgatattgagtaaccggacataccggtatcgaaatcttcccggtttccgatcaggacgtatctccccggaattcggaatggctggttcatacaggaaaatttcaaatttgagctagctggaggtaggtctggaggtgaagggagacagctcgtctgcattgctgtagctgcaagaagcaagggttacacctggccaacgtggacgtccggagtctgcttcttcaaacttggttttgcatgatcattctatcattcttgtcgatcaaaagaatcgagcaattaagtaaaagatcacggatgactcgtgccgtatttctatctccgggtttctagcccggcggatgaataaaaccttcgtacagaggaaatacctgctctatctatttccagcaggcccatgggtgtcggcgctagatggcgcgtttgaactatgatatgcacatactatccacagacagcagtagctcgagtcagtgtgctgcttagttcaagccccttgatgacaaagtgcctgcaaaccccgggcccagtttcctcttgctggatcgggtttagggcgtaggtctcccgcataagagatgacaatctcacatacaaacggtgttactctctcgccttcgcacaggccacctggggtctttgctttgtctatccgaacatgacgtactctcccatggatcggcaagcgatcgagaccgacggagaccggcgagaaacgaaattgaatccacactttagcgaggttcctacccgtctcgacaaatagggagcttcgccatttaaaagagctaacaatgctctggaccactcccagtcgatagtcgatccggggcggtagtggcacagtttagagcaaaaaggggccaggattgtcggttgatccgcccaggggtttgccctgtggttcgtccccgatagcgtccccggtcagccccagccacttggcgagtgacaccgtgtgtaacaggtagtgtcaggtggctggttaagctcgtctcatgtttggtttgaattgagatattgaggaataggagaaataaaaataaaagtagtagatctaaacagtacctcatgccatatccaagcctgcatagaccatgtgggtcagcacaatttccttgaagcttggagactccaaaattaccgtgtgggactgcgggtacggcttaacggaagaccgcgggatcatcgatcacagcccacgccaatagcaggccgctggtggaaatgggcaccgtttcttagccctaaaaaatgagaaaagaaaggggcgcaaccgtgcacaggattttagctccaaccttcagggctgagtccttgagttcctgagagattaggtgtgtctcgaacactcaatccccatacttcgatccattgagcaggatgctattggttctaaccctggtttttccgtgtctttattgtatagctgaatggaccacctacgggctatcccgattctggtagcactctcaaaggagtatagacaggtttgaattttcttttcttgccttttcttttggatttttattattgtgcattgcccagtaaacctccgaggttggatttctgtacgcccatcatttcaccttcatgcaaagtcactgcgcaacaatcgacacgatgctttcccctttctgttgatcaaatcaacgcacattgtagacttgcatacggagtactccgtactccgaaggtgagagcctcatgggccagttacccgccccttggtcatgggagaacacaaatgaaaagacaaactcaaatcctcgatatcaaacttaacatccattgttaccatggacggttaccgttattaactccgaggacgcccaataacctccgagaatcgtccttgagcactcgtgccgggaggtctccacccccgaggtattccgtacaaagaagggtacaaatgacaagggtagcagagtataaaaaataattaaacctaagagccaccttatagaaaacgggtgcctaggcattaatttagcgtttcggccatttcacatgaagcacaggggccaaaaaccaaaatgcttgaaaggatttgtatgttgtagtgacatgcatcggccggtgtcagagaccggagaaaattgggagaaggttaaggcttgcatctatcttttctttctttttttttcttttctccctctctgcgcttttgatttaatctttttcttgaaccacagctgattaaaaattgccaaggttgactaagatgccactagagaagtttcgggatagagcgaacccgggtgctggcccgcattgtgaatctcaactcgattggctattattacgacggaacgatggctcttctagcgttagcgtccaaaagagggactcgatcgtgcgtcgttctgggatgggtatatcagagggaggtttttttttataaatctctgtcaagcagcgtggccgactccgttcggagaactagttcgtgagatcgacagggttacactcccacgaactcagcccagagagagagaaaatactaaatgggcgccgttaggctgtttcgagtttatttggatggagagctgagttttctctttagacaattgggccgtggaaagaagcagctgagaggtcggtgtaacttactagtacgcgtctttaaaagaaggaaattgatttcctttttttattcattcatttactcttttcacgtattattccgccgatcttcgatatactccgacgagaatttctcagcccaagccgtacctgaaactggcctctgcacgatccgagagcaacgtcaactagctttcttttttagcctcgagtccatcctgaggtccacacttcaatctgcatgggtcaagtacatattctagactttgtggtgggtcgatgatattcgatttaacgtcagggcaaacggatgggtaacttgtatgttgaagtacttgtacaatgtgtacaacgtcgacagtcaaattggccttgtatatacggaataagttatagtagagaggaaggaaaaagctctcttccttctattattctagaggctacggagtatagagagtctataggatatctccctgacaatcaccatccacctgaatctcaggcctcaagagtgatcttatttacactttgcaacatataaaatcaattacataccccaatggacgtatcacgatcgctccatcggatccgagcagtccaagccgttgcaaatcccctggccctaactctgtatagattcactccccactggaaagcatgccgtagcacatcctttccccacttgcacgtctctttgtctgcacatcatccccaagcgtctatctctcgatttctctctttgatctcggctagcctgatgacacatttaatttccaagaggctcggatgtttaccggactcgaggcaacctcctgcatccatcctggtcattattacacctttcccgctagttaccagatcctgatacgctttgctcttggacgtcttcctttttttttctaaattggttttccttattgggcttttattctttttttgcatttctccattttcctctttctttccttttttttccttttttctttctttcttcgtttctttttctctctttttcccaaggcccttttattcgagctcgaggtttgtcttcgaaaggagtaagatgagaatggagatgggtgcagctagataaacgaccctggaccctccacttgccttcacattgacacggtcccctgaaccccagtcacctagtgtgtcgcgcagctttctgtttagcctcagttcgggatcgcccgcgtggttcttacatttttaatttttcttttccactttctcccaaaaggcaccccatcccagttctttcttctccatcttgtactcttttccaagtttgcaagattctgtcctgggccgtgagagaggtcgttcatgaccggcatggtacagcccgaccttggtcctccagcgacgaagtacaaggaagattcgattgatgatcccgtgagtatcatttctattggtatctttttcctttccagttcccgtctaccctatagatttttttgtgagatctttcctacttcaatatcattcctatctttcttggtcatttatatgtggttgccagctctatgtccagtggggttatctcttctctcgactatctctcttccgtcaacctggatcttgtgggagcaccatggtcaataccccaaccagacagccttcaactcaggatgccaaaactgatcgatttggggcctgttggccatgacctaaggagtttgtcccgtttatatctcttctggacccacgaaagccctgctctgactagagcctcactacgaagaaaatgtttcaattgagaggagcaacggaaaacaatgcccaaagtccgtgtatctgcatgatccagcttcgagtgctgtgtcccccggaagaaaaaagaaaaagaaactcccactcgtgatatcaaggacacaccaacgctacacagatccatgctattctttagttctggacggactatcccggctataccctggcgcaattgttacgcacctaaggctagccctgttcgaggatttccattgatctggggcccaacccaaccccccacctctatgatgagattctgcatacctgcaagattcaaattcccacgctagaccggaggggtcatatgctgatgtcactctggatacgtctggtcgtgtttacaagtttcctttctttctttcctacgtccatgttctcagcttgtagcaccgtgcattttttggctcgaatcttgcttgtcgtatctttctggcatcctttcggggctggctatcaaagttccagtcactgatgtgtatttctgctacagcttcgacacggcaactctgggcgttcgggttctcaacagcctcaatctcgatcaaatctagctcaaccacagaagcaaggccctgcctcgcctgttcagccctctcgctctcttccgcctaccacatatcctcccccaccccatcaattaggaaacgaagttctccatcataatcactacggaccgcctcctcaagagtcgccctactacaccacccattcttcctatacatcgaccccggcgtcggcacattacccttctagtggtaagccagttctttttagcagtgggaaatcgttgcgttgagaagtgacgcacctgtgcttggctttctgacgcccttggcccatttaattcttattaaagacatcaactaatctttaggattagggccacctgacctcatggcctctaccgctcaaatgcagagaccttatccctctatctaccacacccctcaatcaagctcaccagcctcggtagcttctcagtcacatgaacaacatggccgcaacatgtactcgtcaccccagatgccgccacagatgtttggctatcctccatactcgcccatgaacccagttcagcccccatacggggcccaccattctccccaacagcatcctacaacacagccattgatgatgcctcctcagaaagctccatcccaagggccaccacaccaatccccccacctccctacgtccggcatgtccagcagccccatcatgaaactcgatacctcccaccccagttcttcaaagcaatcgatgctgaaccctccccacacggcaaccagcagccaccacatgtctgctagtaatccccacgcaaccccatcactaggcggcagcacctccagcgcagcaccaggccccatcccagccactaccccactggtcgtgcgacaagacagcaacggcgtgcagtggatcgcctttgaatattcccgagaccgggtgaaaacggaatacaccatccgctgtgacgtggaatccgtcatcgtggacacgctcacgcaagaattcaaaaccgagaactgcgtgtacccgcgggcctgctgcagtaaagaccagtatcgcgggaaccgactggtctacgagacagaatgcaacgctgtcggctgggcgttggccgagttgaatcccgcgctgaggggaaagcgtggattgatccagcgtgctgtcgatagctggcgcaacagcaatcaggacccgagactgcgcagcagacgggttcgccgtatggctaagattaatcgaagacagtcggttcccgcccagtctcatatgccgcagcaaggcccggttggtccatctggtccgcctagtccgggcatgaatgctatgccggctcctgttccccgtccgaatttgggtcctatgtcgatgggcccgccgcagatgcatcatcatcatcaacctgatggtaatcctaatgaggaagttagcggtatgtttcaccacatgtgatgtactttgtgctttcggtgttttcctttcttttttaattttcaatagcggcggctcactcccgtattctcttctggggctttttttggaccgggtctatgtgtgtatgtgtatatggggagttttgtgtcttgtcaggtcccatctgtgtgtgtgaggattgtcaacggttgtatgagatgtgtactctctcttgtatccctgcctggtccgcctgtgttcttatatgttctattccataccctgttcaacttcactactttgtcaccttttatcatttgacaccgcgcttcttgtgctttggctcttcttttcttggaactgaacctcttccccgacatggttgtacagcgtaggctaattatcccaacacccataggcacagaatacccaggccaccgaagcatggacacacgcctcccacagccctcaattcccgacctccgccccgtccacatcttccacgacaccccaacaaccctaaccccaagcggcagctccagtggcccctctatgccccctctactgcgcgacaacaacctcacctcactaagccgccacaccatcgccaccgctgcccgcatcggctcaaccaaccacgacatcgacgagcaaggcccaaccaacgaagatctcttcagccacctcccagacggcaaacgccgcaaattcatcctagtcgatgacccgcagcgcggctgccgcgtccgcgtcaaggtcgtcctggacaaagtcaacatggacgagatcccagactcctaccgcgagtccaacgccgtctatccgcgcacctacttcccgatccagatgcgcgacgagaaccgtgtgatccccgccaagcgattctttcgcgatgacgccgagcaggcggatgaccccgaatcatcgactgtgggtcgcacgaccgtgcccgcgccgtcgctcgacgccgacgctgaaattgacgtgccgaagatctcccgcagaaaacaccacaaggagttgatgcttaatgacctcggctaccgtatgagctggagtcagagccgtgtgtttgcgggacggatcttattcttgcagcgatcgtgtgagtgtctacgtctatttgttttttttttttttttctagttttcgtcttttaattcccactgggggatttctattttcgacatccacacgtgcttgtgatcaatccatggatttgatctgacgacgactgagacatgtgagacatatgagacaccgctaaccgtttgcgaatagtggatgcctaccgtgataaaatgcgaagtagtatgatcgctgcgggccaggacgccacggatatcccggatcatttcgatactcgtcggggcaagcgacggttcctggagcgtgggtgtcgggagtcggagaattctgcacagcggagtgcggaggaggttgaagggtgacgagatgatttctaatattttcatttttcttctttttttattagttctgtgttttttctgcctttttttggtttgtttatatcgtttccggccgaggtatgcgacaagggcgttgacggtttgcggaaaaacagccaaattccaaaaacaggcaaaagggagatatgattgatatgatctggatatgcctcagatgataccacgactttgattcacgttgaatgagacatgtgtgtttatatagagaaatgagttgacagttgacagtgttgacactgacgttggccgaagataaaaatagcaacgcaagggactcacatccactgtaatccacatgggaccctggaagaccctggaaaagaaccctgcgatgatggaatgtatactctgtaaccacgttcacgtcaacggggagaatagaaagacgaatcatagcaatataataaaataagtattccatagccctggaattctcattcagcgtggtaaatcgaagctttccccgttgtcccggccaacgcctttatttatcccgacctttgtactctcgacttcgtctcttctctctacatttcttgtttattgtctttttggagagattcgaaatcccttggtgtgaattcggcggaattcagctgcattcagtctaaatttctgccttggcaccttccctgcatttttctccgttcgcgggattccttcaccctcagttctttattattcaaagtccggtccacccggacacttctccttccaaatgtcagactcagacaccccactacctccaacccatcgttataaccacgcctctcgtgagaaccaaaccatcacacccggcatggacaatctcggtcccagctcgccgggcggtggcatcagcggcatcgccctaggaatcgccaatacacacagtcgccaaagcggcatcgacgcatctcgcggcatagacgacggcttcactggccccgccgagcgcgagtatcacacaaccggctcagacacaccctacgtgccctcaccttatgccggcccggactcgtttcctgccgaacaccacgcattaaatatggcgagaggcggcgcgctggcctcgcccgctttgcagacgcccagtcagtcgtcggtgcagctgagcgatcccgcacacagcccgtacccataccccccgacttattcgggcatcactgatgggccctatcagcgacattcaaccgcgtacagcaatggtgagatgacgaatattaaccccgatgagatcgtcgatgatggcgatgaggactttgggcccccgcggagtcgagctgcgcctgctgctgcgggtgccgctggtggcgccgcgactggtggcattctgactggattgtttgggcgagagaagaatgttgatgttgcgtatgactcggttcctggtggtggggtggagagcggaggagcctcggggagatcacagagtaacggaatagacgggcgcaagaagatgggctggattgttggtcttgttcttgggtttgtgattctgggtgccatcatcggtggtgcggtgggcggtacaattggcagccatcatcacgcgaaccagtcgaaggttgctgccggtagttcagacactgctaccggtgatgtgaagaccaatggggaccttggcaaggattccgctgagatcaaggccttgatgaacaacaccaatctccacaaggtcttccctggaatggactacacaccgtggggcgtgcagtatccggactgtttgaaatggcctccgtcgcagaataatatcacccgtgacatggctgtcctgtcgcagttgactaatacagtgcgtctttacggtacggactgcaatcagactgaaatggttcttcatgccattgatcgcctcgagctgaaggatatcaaactttggctcggcgtctggattgactcgaacaccaccacgactcaacgccagatcacgcacctctacaagctcttggacgacaccaaagacacatccatctataagggtatcattgtcggcaacgaagccctcttccgtgccggctctagcaagcagtctgccgagacgaccttgatctcgtatatcagaaacgtcacaaaggaggtcaagaagcgcaacctggatctattgattgccacctccgaccttggtgataactggaatgctgagttagtggaggaggtggatgtcgtcatgtccaacgtccatcccttcttcgccggtgtcaacgtcgatgttgctgctgcgtggacatgggatttctggcagacccacgatgtggacttgaccaagggcacgaacaaaacgcaggtcatttcagaggtcggatggcccagtggcggcggcaaagactgcggtgatagctcggtctgcgacgacgacacgcctggttctgtcgccagcatcgagaacatgaacactttcatggccgactggatctgcccggcgctggaaaacggaactgattatttctggtatgtcttgctcactgtccattggtctattcaaattactaacactctacaggttcgaggcattcgacgaaccatggaaaatccagttcaacacgcccgggaaggaatgggaggataaatggggtctgatggactcggcacgcaagctcaagacaggtatcaagatcccagactgcgatggcaagacggcctcgtaacgtgctgtccgatccagccctggctctcttatggaatcatgatcacgaaatgttctcttatctgcataagtattgtgttcttagtctgaattgttttctgctcactggcgtttgtctttctctgataccattcatcacaagggaaccctcgaacatctcacctctcatcctcacacctttcctcgattttcaccttttccacttcgaatcaaaatctcggggttcccttcctggcggtccatcatccttccttcctgtctttttttcatctgcagtctttaccaattgctactcttcttcgagccatgcttgattctaccttgcatatcttctttggtgctgtccattcctttcattcccatttatgaggatggtcttcgacccatgttttcggtggaaatttgtcttcatgggatattcacaggggtcatttgcgcttgtgtttgcccgcctagctccatgtatatcatataccagctcccctcggcctccgtgtacatattaggtcaattcatcaatctcggtttacctggaattacctgtaaaaaatatcatatccacttgctttcttcattgatcattctcttcttttcctgcaaggaagccctcaggtattattgtacagaatataggaataagacaatagaagtggaacataaggtctataaatgaacaaagagggcagactgactattcagaataactaggatagaaagtgcctacctattggctagcacttctgcaaatgctgcgaacaacaaacccctcacttagctagcaaacaatttggtaaataagagaaagaataaacaaaagaacaaagaaagaaacatatatgtgctgaggatctgtagagtcaatgcagagcgtaacaaacaagacaataatagaagtagattcataagtaggaaggaacctcgagaaagaaaaagtcctcagaaagatcttcagataacagagagctatctcggtttaaaggttccaaaaattagaacggagatgagaacagaaatccttttgttaagctcctgacggacaatagagaactcggaaaagtacggtctgtatccgcagagatcagacggagggtttccgccgtaacatgcttcgtgcccttagaccaggaccgaagccccagcctcgtttcagccttagatgagccgcggcaaagttcctatcagagtcttcaggatttcccttcactggacaacagcagacgtatatttccgaatctgaagctgaagaaagttcaaaaaattgaaagggtactcaacaggaacacgatgtgcaatgtggactggagtggtgtggagaagaaagcaagaagaaaagagaggggggggggggtttatacctccccgggggcttgaggaaatttgggaattggggttggtgacgatttttgaccgaaagggaaggcacctgatcaggacggtacgtggaacgtgggtacttcgactagtgggaaggtgcaaacgggtaggaagatcatgatatttaactccagaaatacaccaacgccaatccaatgcataccaattctataacctcatgcatctttcatgaaccaaaatgcccaaaacactaatacacatatcattctgcaccaacgacctcctcgacccaatagagcctcgtattccaaaacgcatgctcaagtgcttcaaacaccggcaaacaatacgactcagccccatccacatagccttgtagtacaccaccagagtccgcatgctcgagcgggccaccgaacaacaaccacggcttcgacggcagcagcaattcaagatgtttgcgttctgcgccgggacagaagagcagtgtgtttgctgtgatatgcgagaaggcctctgggtgtttgatgacatttatgttcagggctgcgaggagggattcgtctaatgtgttgaagacagggtcttgtgcgtagacttttatatccgaggaggtggtgcctgtgctgtggttagcgtgggatactgtaaacgtaaatggagacagtcaaagcaaagaagaagaccagaagtggaccatccaaaggatcgggaaacggacaagcaacttgatccttaatactcgccagggcagcaagttgataaagcgacacggagcgccgatcaacccatccatcacgcaagaacccactcgggctcccaagcccaatacagacaacggcgtcaacagggcaacgggctgggatggaagaaggagcagtatcagcatcagatgaagaagaggctttttctcccgccctcctcagccgttcatccaaaacgcccgtcaacttagtccaactctccgaaccctcccagcgctcacgatgagttcgaaactgcgcctgcagctcatttagcgtgagtcgacccggtgcctctgcgggagtcaggacgggttcttcaggctggtcagaggagatcccagtcccggattctttgactgctgttgtgcctcgcgggcgtgtgcgcattacgcgccgcacgtttccgccgctcgcgacatgggtccagccgtcgtcgtcggtcacttgggttcgtttttgggttgggcgtttcggtcgggaagggtgggatgtatggggcatatttttatataagtatacttatataaataatgtggattttggacgaattgggatattgtatagggttggatttattgaagcttttttttggagatgcgggggaaatgcttggcaggactccaacaggcttagtaagtagactggccccgagaagttactccgtactgagggtgagatagaactacatattcgggtgaaatagtgaaatgctttgcaggaaaaagtccaacaatccagaacttaacctatgggcgcactcagccactctgtaagcgctcaagttgtttccccgaacgttagcgtccccctcggcgcttccaccgctggtcgctcagcaaatcatcatgcagtattcaccctttgagtgatggcacttgcagcggattgtgatgatcccaggctacccctgctcttcgtcactcctcgagccagtcatagatgcctcgccatgcagtctcggtcacatctgccttccagggttttgactcgtccgcccagtgaaggccagtcagtacccctcaaaaagaccacttagccctcgaaaatcatgttttggtcttggtcttggagtttctatgattttggtgtccatttactattaccgttgccctccctattatctgcttttattctgcgatcggagaaatcgagtctgagtctcggcgacagctgaataattcctcaactcgtgcaacttgtcaccgtcgctgtatctcaccatgaatttcacacaatccatctcgcgatgggcttccgtcctactcctgctgtgcttgggtctggcgcacgcccataccgtcattacttaccctggctatcgcggaaacaatctccacaccaacggcaccatcgagcaagctaacggtcttggtgttgcctacgatgcgaagaatggctcatacatctacccatacggcatggagtggatttatccatgtaagcaagacctatctacccgtctagatatcaatcactgactcgtttttcaaggcggtggtatgcccaggtcgaccaaccgaactaagtggcccgtcagcggcggtgctgtcgccttccagccgggctggttcccaggccatgccactgccctgatctacgtcaatctcggcttcggcgaaatcccggaaaatatgagccaccccgtcgtcccgcccttcctcatcgtcggcccgaccaacaatccttaccccgggactgtgtgtctgccacaggtgcctctgccggccaatatcaccgtcagcccgggtgactacgccacaatccagctggttgagacggccaagcacggcgcttctctattcaatgtatgttccagtcccctcgttccgacccggcaatcaatatactgactttctagtgcgtggacattgagttcgcagaagatggcgatgcgtctgtggagacggtcactcgcgacaattgcttcaattcgtccgatatcagcttcgagtacatgtacaccaccagttccattggttcgggtgcggcgatgctacatccgaaactgtcggctgcggctgtcgtcccgcttttgctggctgttgcctttggcgtctacatgtagatatgtcgggctttctttatcgcattttcgcgcgctccttgttttgtccttctttgcgccatacccctggttttcattggtctctgacgcttcgacatcggtgttgactacatgtccatgtctttctggaatggactatataattgatgttctgggtattctggcgttgactggtgtcttgactctttctttaattctactgaacgaatatacttgtccaatttgttgacgaatttgtggagtaggcacttattcattcaggtgacgcaatcccaattccaaggctgagttttgagatgacttgacctcaccatgccgacattgactcatatgatgtacctccccttgacgaaaactaacgttattgattcaccccatccaggcctatctttccttttgatttcaatctctcgagacattcaagatgtccacagccccatatttatacggagaaccactccaaaaggctttacctagaaaaatccggagatatcgcctcacttcaaaaacaccgaatattcctctggttgaacgtataccaaaactcaaaccgtgctgatatgatgggctattacggacggaacttgcacttcgagagaacactcaacgcgagatggctttgagagagaatatcgagggactcctcagggcacctaccactcccaagctagcgactcgcatccaggttcagtacttgcagatcaagatttcagatctttccaaggaatattggaggttaggacgggagtggtggaagattagaacttcgtttatggatggcccgttgaaggaatcgattattgacccgcgcaaccaaaatggtatatgcatggtgtgctttgcgacgattgtgctgggaggggaggttgctgtgtcagagactgcggatgctgctatcgtcgcggtgggaaacagttttcggttggccattgcacagtggaatgttcctgctgtgagaaggatcggggtttcaaactcgacaaaaaaagaaaaacctcggtttcgggaggatttcaagactggcggcccttcttattttcgaatcagggatgctgctttacttgggctgatgaatggtagctggaagaacccgtcggatcatattcgagatttaccgccgaaatatatgtcgtgaaattgaaaaagaatatatatgtttgctcaatactccgtactctgaatctcctttgagaaatgtcccttggaaaggaagcttatggtgggtgttggttgacagtctggaccttcccgattaggaccgacgtacatatgtagtgttctttaattgttcattccccgccaccctcgacagtattaaactcgtaccttaaaaaaacctatattcctcaacaatcacaatatgtgggtggtttgaaatagagcgaaaaaaaacgaccactatgagattcgaactcacaatctcccgatgacactataaactaggagtcgggtgccttaaccattaggccaagcggccatccgtccttttggatccacacctatttatcatattgttggaggcctaggtggtgttaaataaatcccggcccttacattgttattacacgtcggatttctttaattctgacacttctactttaattttaaacgggtatgaactatagattggttcgttatattgagtttgaaatcccaatactcatactaacatcttataggctgtttcatgagggattagagtattcctgtctgaggagtcagagcctgacatttttctagtcttaaattagcagaacgaacgctattcttttcttctcggaatgtcatatactaggtacagatttaaaatgagaccgaaaggactctagaaagacatataaagcatatatttcgcaactaatcatgtcgatctaaggtgtagctaaagaatgagggaacataatctcttcatagtgtcatagctggaaggacaagtagctataaaagtacctccaggagcaagaataacagtacggagtagacatgacgggcttatcactctataatgtagcttctatctaatcatttcatactcttcggtgatatacgtgaatgttgcggcgaccaggagaagtagttcagagctaccaacagggacacttaataagaagcagagagctaagttaggcaatggatgaatttatttagaagattcataactacattatgactagacactcagacattctgtagccatcgcccacgtgatgaccctactctgcttaactctcatataaattcttaacatatttccatattggcttgtctaagttagctctcgtttttcaatcaatacttggaacaatcgactgatgcctcatcaaatcacgtgggttgttgtaacgtgaagttctttccttggacgacatcgcttcttgtcatccgacaccgtcacctaaccaacaccatatcaaatcagtacctgcaccacgctgttatggggttcatgagcgccatgcctcatatcaagtccgacacggagaaaagatatgagccttgtcaagtgttatttgaccaccaagttgcctgcgtcgtctggttcaaagatactcttcaccactatggtgtccccacagtcatgttcgagctttatgtccttgtacaagatattgacgaggcggcagaattgcttgttagcgctggatgggtcattgattcagaagagccacttacagttgggagtgcggaggtggaactcccacagaggcggcttgtttctccgactactcagacaacaactgttcttcttccggctcaagagtagaaatattccctggcagtcgactcactaagtgacgatgcgccgttgacagcggagtcatcaccggagaatatctttttcccaccactaccaggcttcctggatgcactgattgagagctggctagactgtccttatgaggatggtatgttgccgattcatttgacctgtcaaatctccaatctgtacgactatgtacccgctctaaaagaacgatcattcgccgaacgaatgaaatatcaacaccgccagttccacttcgacgggttggcgggaatgcggacaggcaccatcccattcagaaagcatgaacgtgtaactcgagatgcattattgcagggccagtatgaactacgggaatgttcggcgtttcatgataatgaagaccttcttgatacagggaggggtatatccttgtgaataattactatagaacttcccatcgtctagcgcttcagatgcaaaagtctttgttgattatcacggggattcagattgatatgcgaagacacggagaaacccatgaataagactaagctgacctacaaggtagttacagtcgattcgattatatacaagcaaaatctaacctacactcacatgatatatcgcccaatagaggaaataatataatctccagcaacaccagcgcaacaggcttgttattcttagcataacatttactacttgacttgcaagatataacagacattagatcatattgtgctccctcttgaccaagtatatgaaaaaagaaaagtcccaaaacggctaaaacgacacaacatttcgttttagagctcaccgggtcataataagggaccgagctggagatataaaagaacgacaataatacagggtgggaaggaaaaacgagggtatcatggaagcgaacaactccaatgggccacaccgaagtagaagaagaagaagaagtgtaagagggagtacaatacccagttgcaggtcaagttttccaaggagagcgagaaagcgagagaagcggaatacaggccacagccaagataaagggagaaacaaagaaaaggatgagccaaaggaagcaaaccaaagggtgtatatcagtcattagagattagatataatcgaagatggaatcaggtcttgaaggcaagacaatagtagccatcgtaggccgcaagtctatcctcacagaaaagggcgaaaagacaaagagggaggaatataaagagggaattaaaaggcgcttggacagaacgtgaaacacagtgtttgttcaatcgcctgactcaaaaggaaggttaaacgaagtcaattcaggcggcgacatatgatcaatcgcgcagcccgaatgccttccgaagaaggggaaatcgtttctttcgtcccgacccagcgatcacgacgtcgcgcgccgaaatcttattgtcatcggggttcgtgatttcaggggtggtgtcaattttcggatctggtctgtcgcggggtgcctcggtctctttcggagtcggagatgcacagtgagtggcattgtcattgacaatgacgcttccattgtgtgctgcacctgcaccatcaatcggcggtgcggaatcctgcgtccggagaacagacgacggggcgctgtgtggctgttccacgactacctggagaggctcttcttccttgccattggggtggaggggccaagagtctggtcctgtcgaccggcgttgagaatttctcttcaccaacttggacggacgagtcggctccgaatttccggcagacacggtggttgttgtgacgccgtggttcccattcaccatgccctcgttgcgtaattgatcgaggtccatacgcgaccgctctaggggtgtctctcttcgcgaggagctttcaacttcagcttcgggaactctatggtcagagttcttgggtttcttgatgccaagtcgggcaaggagtcctggcttccgactacggggaggcgtcataatgaactcctccaagtccctctgcgacatgccacgtcgtttggccacagctgccattccagacatactgattccattctttccgcgggaacctggcgaagagggcactggctgggatgcaaaaactggtggcgcttgctgctgagggctttcttctgaactatcgtccaactctgttgagtcaccgtcgtcggcaccttggcgacgtgggataccgcggacagggcgtaacttattgtttccaagctcatcttcatcgctggaatctgcgaatcgactggtgaagacctggggccgagcttcatcctcgtcatctgaattttcgaaccgagttggacgcgccgtcttagggggcgccttggtgaacttcgctctcggcggtgccttcttgtttgtcgagaagaacgaatatcgctcagctccagtaggtcctcgaagagtcttccgcattgtcccattcgaggagccggatgaaagaggacgatgttcaaggggagagtcgttgcgctgcgttggcgattggacgcggacgttagtactagcagcaccggctctcagtgtccgtcgcatggaatggcgatctccgcgcggagaagtgcgtttgaagctgctggaggaatcacttccatttgacaattgccggcgcagagtgacagggatacctgtttgtcctcctacattctggaaattcggagtaatggacagagacagtggacgcggtttagccttgccacctcgcggagaagtatcgttgcttggccgccgaggatcctgcatactagacgtgccattcacatccaccgacacggcccgggttcgcgtcggaggctgtgcttgaagactgccatgttgagcggtggcgttgcgagtttccaactggagtggccctggcgggtttgcaaaaccaaatccatggccaacagaagaagcaggggattgctctaccaggcggttgaccgaggttggagtcggtgtcacggagcgctcctcctcaagtgcttgatctgtcacatcttgtgactgactatccacgatggcggctcgaccgataggcctcggtgtagcgtcccgagattcacttgcattctcctcggtcggcgccgacctaggggctgaccggctgtcgacaatagcattgatggacccaaagccatcaccgtccatgtcttccatatcttccgctgcatcgctgtagacgctatcaccggactcctcctcagtatccacgtcttccggatttggaacggggctcgccgcggcctggggtctagtcttcttcgcagtcgaattgagactgcggtctgagttggagggagggaacccgcccggaatcctatactggtccatgctagatctcttcttgtcaacactgtgccaagttccatctgccgggggcgtagccggctcgacagcaatagcaggcacagacaattccgagcgcatgctggagtacggctgtttctcaatgacgtcatccgtgactatggtctctcctttggcccctggcttggtatacaaattcggagtatgcgaagtgcggttgacagacaactgctccagaacgctcaagctgtgtggccggaagtattcatttgagagcgacatatccggccttggtgccacatcagatgcagacgaagagctggactcattgtcactgaaatctgggattggcgacctcttgagggcaccgcctcgggtcccccgaatgctaccgaaagatggaagaacttgccggggttttatgactacatcccagtcatcgtcactcgtaaactccgcgtgcgacttctttttgccaacaccaagccaacccatacgagatttggctttaccgccgggcggggaatcaggcgtatagtcttccggcgaggtaggagggctggctggtacattgacaacctcagcctcatcatcgaaactgaccttgacagactttttccgggtatcaatccgggatccttcgtctgaagccactgatgtaccatctgacagctcgctcggtggtaggacgcggccagttggcccaagcctcctatcaggcgataaagaggttcctcttgagtgtttcaaggctgatttgacaggagatactgatctgagtggaggctcgtgaacttgatcaccggctccagctacagagagcaatctggaaaaacgtgcagttcgacctgggctgcttgactgacggtgtggctgctttatttgcagttccgacgagggcgatgagggcactggcgctgactctacgtgatcagtagttggcgatgcactcgtcatccggtttctgctttgccgttcagaggtatcttcgacattcgtattgtcttcgggctcttcttcttcccgaacagtggatggccaccgctcaggaagagctcgtgaggatgggtgttcagcttctacgttagccacaacaggcaccgcgctaccggtatattggtccagagaatcgggctctataagcgaattgtgaaccttcccagttcgaccattcgcactcggcctgttcatgggcacgccaaccgattgggcagtagcatctgcggtgccagccaaaggaacatgtttgcttacaacagggctttcctctagactgccagatcgctgtgctttaggcttcccctttggcaatttgtcagatacctcagcaatcgattcttgaatagcatcgtgaaggctcatcggattgctctcagacatcgtcatcggcgaggtaggtcgcgaacccattgggtatgagaaattcactgaattccgactcgtcgaccgttccatttctggaacggtcccaagactagtcacccgttgatacgtggttggctgaatcggaggccctcgcccatgttcccgatccacacccctcaccccagagcgcggcgaagacgatggggaggaacgcatcgacggctccatactcaccgctcgtcggttcggcagtttccgcggcgaaaacttcgtcgggagagtaggtaacggaggcacatcgacgggaatggcccctggcccgacgggtccggagctggtagctgggcgatggggggattggtcgcgaaaggtgcgtgcgctcatcgaactattactgctggagcggcgcagcgtggcactcacgctggccgagcggcgaccgttaacggggttggcctgcgactggatcgaggtgcgccgctggaccattcgttttgtctgcacattttcaatgggggtcggggtgggtgtgcagttgcggagcgctgttgccgccgcggcggaggacaagctgactgtggagggttgggattttaagaatgcatggctggcggcggactgggcagagtgcgcggcaggtgtggagagtggctgggaaaaggagtcgtcagtttcattttcatgcataggttgcaggtacccgttggattgcatcaggcgctgcagcgggacccatctgcagatagggagatctgctattcttggtagaacacacctgatgatgggcagaggcacttctcttgcgacgcccgaagaccattgttcagagtcttgggccttgtagggatcgaaggggtcaaagatcggatggccggacactgctcggtgcagcgccgggatccgaaattgaagtggatgaagggatgtggatctccagatgattatacgagggtagctatagcaagaagtggaaactagaaaactgagaagttgaggggaaacaactcgggagggatcgaccaagtcagagagccagtcagaaacaaggagatatgaaggtggcacgaggtaaggagagctgtaaaaaaaggcagaaagcaggaaaaaaaagataaaaagccgttcgagacagatccaggaagatccgagatcgagaggaacttgcgtcatgactctgatgggtcaggcaccagaacttggtttaccgccttggtggaccacgttttatggggtatgacctcggtttgtgtacagcatacctagattcattcttatatccctgacacggcatatatctcactcatccaacccacatatattcaatcctaacaatggcccttccacccctccccctccccgcaggcgtaacaagccgcaacattcaaacaaacgatctaaacatccacatcctagaagccggccaaaccccagagaacaataaaccattgattatccttctccacggtttcccagaaatcgcctactcatggcgccgcgtgatcccaaaactagcagcagccggcttctacgtcgtagccccagaccagcgcggcttcggccgcaccacaggctgggacacgcgcggctatgaagacgtcgacctggcaaccttctcactatccatgctggtgcgggatattgtgcttcttgcacacgcactaggctaccgttctgtccggtgcgtcgccggccacgactgcggcgctgtatcagcagccgcgtgcgccctaatacggccggatttcttccagagcgttgccctcatgagccatccgtttaacggggccccggatctaccgtttaacacggcgaatgcggatgccgcgactgggtctgagacggcggcggcaggtggggcgggtggtgcggaggggtcggctgctgcggcggggattcatgacgcgcttgcggaactcgggcgcaagcattataagtggtattactcgactaagcaggctggtcctgaaatgtcggatctggagcctgacgagatgcatcgcttcttgcgaggatactttcatctgaagagtggttcgtggctggggaaccggccacatccgcttgggaagtggtctgctgctgacctggtcaagttacccgggtactatatcatgccgttgaatgagacgatgcctggaacggtggcgcatgatatggagcatgagccgtccggcggtctggcctcgcactcttggctgccggatgaagagctcgcagtttatgccgctgaatatagccgcacgggcttccagggtgggttgaattggtaccgtgttcgcaccgctgctaggggccggtatacgaaggactttgatgtctttgctgggaagaagctcgagccgccttgcgcttatgtctcgggcaagctggactggggcaactatcaggagcccggtgctattgagaagatgaagaacgggatttcgtgtgctgacctgcgtgtctttcggcttgtggatggggttgggcattggacgccccaggaaagtccggacgaggtgacgcgcgcgattctggacctgatcggaggtgtgcgcgactagattcttaatcgatgctattgggcaattacgcttttctcgattcccatttggaactgtgaaagaggggtttgagagatatgatgacgttatgatgggctatgagctgaacaaactggatacattgcatttgcgctcacaaatatagagaaagccctagagcaattaatgatgaccgggagctgaagaaccttagaacctcgtctctttggacaaccaattgctgattgtctccagtgtcctcaaaggcaagatcgcaaggatgctagagtccaaagcctctccatcatcccctttgaaaacttactgagcgacgttacgtccatcttggggttgcgaactagtattcgcttcgtgacgtcatccgaagatcgcacattggcaataatcagcattgggttgccacaaatggccccaagaacatacttgatcagttgataattgcagactccagatggaagcctttcccccggagatagatgcttttcaacgtaccgcgagttgtttgcgttcaggtatgccgttttagtcagaacgtgtacagctcggcgatatcagaacctcagcagggtgagggggagcttggttgtatgaatttaaaacccaattttgagcaaattggaagggacgtctactatagaaagagaaatattttatgtcttcatattatatgactcattcttcgactcatatggcggctagcattttctatagaatctgatccctacgatactgaatacattcaaaatatgcttttatatatctctactctgaagtctaaagagtcatattcgccagatgacgtgatataccccgtagacagcaattggtcagagaatagattgaattggatacttgcttgtatcaacattgttgaccagtaacaggtgaatagacctatcaaatttcgaccagggaatggaaacatccggtctccgcggtgtgtgcatgcgcccgaggctcccttttcttgacctctcgcttgtcggttgcactccgtcgggggatcgaagcaaggctattagcatatttagcaacagcgaaagcggtagccttcgaattaatcaggaatgcttcgtggttgagattcttgaagttgtccccgacagcatggtaattcacatcgtaggatacgtttgcttggcctccgaacagttttgcctctgcttcggtcttgaggccttcagcgccagtgaaaagtccaccggcgggaattccacgagagatgaaaccctcgtagtcggatcggccattaaactcagtaggaacatagggcagcttctttgacctgaaatatttctcaaacaaagcctcaatctgggcagatcccgctggtccagtctggttgaaggcatctccgtcaccatcgtagatcatgagcgcatagttgggcgaggcaatcatatcgaagttgaggtagagtctgatttttgctagttcatctgcgtccaggtgggaggtgtaatactcgctacccaacaggccgaactcctcagccgtccagaagaggaatctcacggcattcttgacagagaatcgcgtcaacgcctttgccaccacgaggttgctaatgattccagagccatcatcattgatgcctgggccggcatcgactgagtcggtgtgacctcccagtgagacgacgttattgtgatcaccgccctttgtctctgcaattacgttgaatgtagtgcgattctcgacccggctgtccagtaaaagagacacagtcacagcgcccttctctgctgcactgagcaggaccttgccgtcgacatcagaaactcccgcgatggcggaataatcactggatacgccacccagggttccactaagagaccctgcaacgttgttatagacaattaccgcagcggcattggcagcagcagcaagtaacgacttttctgcgaaagtgcattctccacgctggactagggcaattgcaccagccacgtcactcgggtagtctgatgcactgcatccgagattcgagaccactgccagctctgcagtaacctccacgctaggactgtaggtcatggccgatgctttgatagactcgccctcaagcgtcagcgaggtatttgcagtagtccatgtgtgcacctgcggctgcttccacacattgtaatagccggtcttcttcaactcgcgatagatgaagtcaacagtatcgttgtgtgctgcactgccaaagacgcgattacgctcggggtacgcataggcgaaatcctcaagctgttgggtgcccttcaggaggtctttcagtcgaatggtagagggaaagtcattctaataagtcagattacctaaacgacggcggagatccaacatgtatacataccggtgaaacaaggggcttcctccggccagcttcagccaggcccacggacagggttatcaagaaaagccacttcatcgttaagtaatgcgcggattgatgaccattctgagccaggggcagatgtgattttatacccattcttcgtattgtcggcgaccatcacgcgatgataaagcgcaatggtgcgtgattggcagggccccgatggatacgccaagaggccggcttgcttcacttggcagaggaggaagcactttcatagggccggctattgtcctgcaggcggaatccgacggcccttggtatgacaaaggctgaggttaccttgccaaggcattgaggtgggaaggtactagggatagataacattgttgcgggctgttgcgctcattatccagcacattgagccttaagactaattatttagtccgtattcgcaatatatttgccatgatctgttgattaggattgtaatcgtaccataatcagattcagacggccgtgggctaactcagccaactgcctattagagatcagcgttgcggagtactggaatcgtgcctaattcatatccaccttggaaacgcctatctcaatcatatcgtcctaattcataaccgggcatttaaattcaggttcaaatgcattcttcggagttccacttccgtatgagtattacacgaagggtattcgttccgcgtatagcaggctcatctgcagttgtgggaaagagctacccccgcggaatgaagtaattgaatcgcttggggaaagcgcggatcatgagtgagaagatgagaccataggcagcaggtatgagtggctctctttagagcaggaaactgcttgacaccgcataaaacgcttgcagataactatcatcggcgaggacatcccgaggtctttccgctgacgcaataagcgctggtaactaaggtatccagcactccatgagcctccgctgagccaaagcctgttctctacgcacaacatggtctgcctacgtccgtacaccgccgcttcctaagatggaagaggctatttcgcaaacgcccttgaatcacctaggacacatcttcctcctctaaccaatgtcgctcgatgatatcctcctagagtgcagaactatacctacggtctactctctcgtgttacccggctcttcatcgtctggaagcaattcatttccctcgtcagtttcgcatattcgctgtgggcctgttggtatctcggctactccgtggcggaccttgtcgtgagatgcaatgccgcgaacaacttcagtgctgagtgggttgatggtagataatcgcataacccaatttgggtcgaggcctctcgaccccagactcaacccggacccagtgactggggccccagaaaacccagtttggacccagtttggacccagtttgatccattttttgcataaattaggtcttggcgttcataaacctgctaaaccagcagaattacacacattattagcgtgtttgtatagtttgtagtccaatttggctccagaaccagcactgagttatgcggaaacatagttcgaaagggagcactggtgtaagtcataccgctgtagggtatacctaagtaagttggaggggaagttgatagtaataaccttggaagcattcagagacataaaacagatactagagagaggtgtggataggggccctcggatgatgcagaacagtgggccttgactcgatatattagaataagatagacagagtaaactctgataaatcaaaatatctgaataatgactttgcacacttatggggagcccgttccacggtaccctttgactgttgtaaatgaagtagatctgttcattggccgtcgaaagcaacgtggacttgttaaacagctttgacaggataataagtgtggcccatacatagttcgttcgtcagcctgggtgtttcgcgattgttcatctaagtgcaaaaactgcaagacacaatgccctttagatgttaagctcgatggagaaatatattgcttcttaaagccgtatatgacgagtgtaggcacccacgagcggcaagaatggatagcttggttgatcgatcgacctcgagaaaacagattgaagtagaacgtcgctatagcctcattaaacaaagatgaaaggccctcaaatattgcagatctagacaatgctcactacagagtacaagggtcaaggcgacacctgaggtctataaaaaagtcgaggcaaccttggaaatggtcgggcatgacagaggtcagcgaataggaagtcgtgcctgcccgaggcctaccatggttatggaatatgtaccccaggatcaatggcaactatattttcacctacaacgacaccgatgaaagagaatgttgcgattctcatctattcacatgtaaattgaaggaacatcgaaggcaaaaggcgtgaaaatttttctcctcgccaagccaataagatacatatgcaagatgcgcttctgcctaacttcaatatgagctagaaaggtaaaacagcggagtaggtaatgtggacatggctctgatttttgcattatgagctagctacaaggaagtcatggctgattgagggcaaataaatccattaaagttttcatcagcacacaaaaagttgcaaacatgagatcgtcatacaaaggaaaattaaatcacacgagcaaaaggaaaaggaaacaaataactatcatcacaccatggacgagggacaagcgtatctagcccccctaggagaaacccagaaaaagaaaattacagacgggaaccgtggatgaccttgtagtcgacgacgagctcacgaccaccatcgttgatgacgagggcacggacggaaccacggccactagcaaaggcatcactgatgcgctggtagaggttgccctgggtgatcacactgataccctgcttgacatcaccgctctcggtcatggcgacgaggctgttatcatcacggaggtccaggatgcggtaggtcttgaagacggggccgagcatggtctggacaaccaccgaaggagaggggttggcgacaaagctagactcctcctgcaacttgcgggtgaagaggtcgacaccgaggtaacggtgctggccagtctggggggagaccgagatgcggatgacctggcaagggcggccctgaaggatcaggatgtccccgacacggatgaagtggcaagggatgggcacggtctcgccagaggagccgcggttgcggggctcgacgacgcggacgtttgcacggggggcagcgacctcgccgtgagactcctcatgctcagagtgggagaaggggtgcatgacacggtcggcagcgcgctcgacgccacggcggaaggagtggtactggccttcgtcgtcgtagtaacccattttgcgagtaggggcggtgtcacgggtagtggtagatgtagtggactggggagcgtttacttgggatgaggtggagtaacgagcacggggctgaacttcacgaaggtagacgtcgtctgccttgtaagagtcggtctggagttgggcggtccggtcgtacgaaacgtcgacggactgaggttggtaaccgtaggcggagtctacgggctgacgataacgacggtcgtaagagacgtcgaggtcgtaggagggggaggtacgttgacggtagtctctttcagtgaggtcgagttggttctcgacgactttatcgtagacttgagtgcggtcctcgtagtcaacagtgggttgttggtaactggggtagctgggaaaggttgtcagcccacatgcacgggtaccatatacatataaacaaaacaagcgagacaccgctaattgaagtggatcggggtttgtggacacgtaattttagtccccggcaaaattcgcaatcgctccatcccaagataggagatctcacaacaaatatcgatagttcagctgcagggccccccctccccaaannnnnnnnnnnnnnnnnnnnnnnnnnnnnnnnnnnnnnnnnnnnnnnnnnnnnnnnnnnnnnnnnnnnnnnnnnnnnnnnnnnnnnnnnnnnnnnnnnnnnnnnnnnnnnnnnnnnnnnnnnnnnnaaggggagacctggggctggagtaaaaaacacaaaaaaaacaataccaggaaaaacaattacataccgttcacgagtaagctcaacttcaggggcgtagttgtgctggtaggactgcgagtactgctgcgattgctgcttgtactgagggtgctcttcttgaatgcgcggacgctcttcttgaatgcggaactcgatgtcttcctttctgtgaacagaagcgggaaggggagcagaacctcgagtatcttcccgttcgacgcgcgaagtacgatcgaaattgacttctccctctactcgagtctgagtagtttcagagacagcgtcactccggtacgacgacgggaagacactgaaggggatggggacacgggcgtcaaagtccagattgacggacttctgagcgtcttttctcgaatgcctttcgaactgtcgttaaacaactcgaaagactaaacaagaaaagacttgaaagggaagtctttctcggggtggggaggaggaaaagagaagttcttttgatcctgcagagatagatagatgattggaatggaggggaagaaagataagattaagagccggggaatgttagattgtaggaatggaagaggaagaggaaatggaccagcacagtcggcgagcatcacgattatttatgccaggccatttgtttacgccgccttcccggtttgagttctcggctgatcaccgaggtactctcctccttactgtctctctacgctatctgaattgtcctattagaaccgcacgatatgtctgatggaagtcctccttctcgttctggtcaatcattcttaaaccccccaggaaggcatcttcattgatggatacccgagctgcaatcctccatacacatcgggccctttcgcatggggggctggccagcctgcgcgtaatatcacagcaccactactatatcgctatggcaacctccggggcgaatcggacatctggatcctctttgtgccgatcttataggctccatcacatcggcacacttgcattgggggttgcggagacaccttcagcgtgattattattattattattattcattccctcggctgaaaaaagcgtccgtttgttttgatcctgccacagggcgtttgccaggcagccattggcctatatctggcactattcacaacatgttccaggatacgagacactaatacgaataccaataccaataccaatgcacgtctccaccggcaaagtgattcatcgagatcattagaccacctttgggtcccagcccgcctcgccccagctactgcgaagcaccagccagccagtgcatgcagctcatggctagaccctcttaccgcccaagaagccgggaaatatgtttcaaatagcggtaattgcccgtactttggttttctcataatgagacatctgaagagggtggttaccagccgcgtgtttatgattccagtcatgtcgccactgctccaatggagtgattatcttgtttatgtatcccgttttccgaggtccacggaatacccggtactatggtaccaatccgtgctccgtaagtggatgtccattacggagtcccatactccgctccgcacagagaacggagtcatactgcagaagaatctcagcggagcacgcagtacaacataatatcgtctccatagtagagcctagcaatttcgtacatgtttctatttccacttgttccactcactactccactgttctttttcttctctcattggttctttcagatattttcgaagtataggatcagacccctttccggggtcaactcagctgtacatttacttacagagtggtattatattacggtcgcataatttctattgacagctagaagattatactatcgtaaaggtgcaaaaaaatctatgtaattagcgacatacgcccgtatttcttcatatagtagctatgtagcgggttcgaaaatgagcaagagccacaagtttggcgtttattgcgcccgataccatagacttatacgagacctttcctttatgtatttcggcgaatatcatgcgtggtgtaacgctcgaagtcttgatatgcgaaaggctggtgttaagtccctggcgatatagacgttggttatatataatttccgatacaagaatgccatgagaacatatttcttgtatccactactccatatacgacgtacatattgttgaataatcaagaaagcgataacaaagcgctcacgcaaccgaagttatgctctttgagaagttgcagctgggatagctctagaccatcgcgatgtttcccattcgtcacggaatgcctcgctctccgcattttgtgtcttgtatctccataggagtagacttggttggctaccagttcgccgattacagatgccgaaatcacataaattgatgcccaattccgagcccatggtgtaatatgcaaggcagcgaaaaggtaaccggctgcatgttgactctaaatatagtcggtggttcggtcttatgttcgatacagaatgcagcatatcaatgtattaaaaggctgtaaaaggctgtttggtacagcctatcaacaaggtcaagcaagatcccatccctggagtccttcttgataatacgttgattcttctgccattcagctatgaaccggtacgttatacatggacaaatcatctgtctataatatactccatacttgtggaaaaatatagctcgaatatcggtaatggacagaagagtagtgatactattcccactagaaaaagaaagaatttcttacaagacaaacagccatatatcggccctgacttttcccaaacaccaaaaatgaaacccaggcaccagaacggaagacacaagtggaagctagacaggaagaggacttcgtagaagaatgaccataccgaacagtaagacataagagtcatagcaaagcatggatcacaaatagatagatagaaaacaacatgggcaatgaaacctcgaaaccaagcgagatgactcgccactaggtacaaaccacccttgttttcaaagatgattcatgacgccggaccagtatggaatgacatggagaagagaacagagaagaggaaagaaaaaagcaactgagatgggttctagtatacatcgatggacggtaaaagcaaattaagatgggtatcgtgatgcgaagcagcggataagctcaaaagatgatagagcgagaagaagagggaaaccagctgtggtagtggcggagactaccgttctccaaacttgccgaactcctgttgccatttgagaagatggcgagtgagcacgtccatcatctccacgctgctgagctccttgaaatccctttcatggttcgtcgactcgccatagccgccgtctgtggttgcggggccggactcgcctccgtcactgcgcgcggatggcatatcgttctcaatctgattgaccatgctcttcaagagtaggccctgggcccggtcaccgttgccagtaggtgtggaggagttctcgctggaaacggccatctccacttgcatgcgtgagatgaactctaggatggctgctactcggcgcttcatttcgttcatcgttgttcgatgtggatgcatgtgacgcggcctgcttggccgtcctgactccccaccattcacgtgtgcgccattaacaccgctgtagccaagtcgaggggagtctccgccgacttcgtgggactggccgcggcgcggcgagttcgccatataaccgacatctccattcccattggtgtcccggtcttttgtatattggtttcgaccaacacggccgcgacgagcgggaggtcgaccggacttgcgagttgatggacgaacaggagcgggctcttgcggggtaggggtgttagggcttgcttgagacggttcaggctctggcggcgctgtcttggttggggaaccggtttcgtgctcggattctgttgtagctgtgttagaaagtgaaaaatcgtccactagagctgtgtcacttaccatctcctttgcgccggtttgatcgttctttccgacgtttcgccgcttcaggagcctctgtctcgccctcgtcggggtcatttttaggttctttctccacctgacctcgagacgtggctctctgtctgcgacttccgttgactgcaggctttggtttcgcctcatcaccagaaggcgggtgagatgctatattgctatgcctcgagacggcgctaggtgagggtgaagtagttcgcggacgtttcgctcgttctctattcctgggtaactagtcagccatattatcctagccaatgccatgcagcttgagaatacgcacgtcacactgtcacttcgacttcgcttgcccagatgtgtgtctgtctcatccgcattacttttagtctcagccttgctctcctcaattgcgcgtcgtatcaattcttcttcatcgtaagcagcatcccggctattcattgttgatcgtcgcttggcgtgcgcagcggcactctcgctggtccgggacttgggatccctggaacgccgcgatatatctctcgaggaggcacgagaggacgggccgggggacgggggaaccgccgggacaaccggggcgactggcacgtcaggtacctcaggcaccgccggggttggggtcggggtcggtgtcggggctggcgctgacgctggcgttggtgtttgtgatggcgctggaggaggagggggtggtggcggcggcggcggaactggttctggtgcaacaggaaggtaggttgaggatcgttgtctgcaggattgtcagtatgcttcttgaaaacggtatagatggtaacatagagtagtcatttgtatctcataactgctcgggggagtgatcgtgcccgaggctgggtcaaaaaaaaaaagcccctccaagcagcaagaacaaagcacatccacggagatatagattgacgacaaatgcaggaataatacgtagggccgagtaaatgcaaagaatagcattgtttcacttacccatgaggttcatctttgatcttgtgcaaatccttccgacactcctcacaaaaatattcgtcaggactcgttgcctcgtccatgattccaacacaaccaccatgttgccaaactttacacaagtcacactggataaacatgctcccaatatcatctgatagaggatcagatagatcagtggggacttgtcccgactccagcttgatggtgccgcgaccgagggcctcgcgacgagaagaaggcaagcccggatattcttgctgaccacagagacatcgagttacttcctcctcgtcatcatctaggtcatcctcgtcttcttcacggggtggatcatcgtcgtcgtcgtgagcgcgttggcgctgccgcgtatgtggagggtcttttgagccaccctcagcatcatcgatggactgagagcggtgactggtcgattcgtgaggagagggattcttatgattcgatcgagtgcttctctcacgagtaagagaatttgaggagctggaggaagagttggtttgttgtaggagggcaggagagggctgggaggtgcgagcccgagaggaacgacgaggagacatggtgggggaggtttgagtatttgaaggaagtataaaagagagcactgaaagccagattaaggagaatcaacagatttccgagacgttggctggtgtggttctaggtaactcgagaaaacccgtttgcgagggagctctcgcgcgcgattgagagctcttggggagggtgcagagtcaagtaaaaagaagcaggacaattggaaacaacagatatgtataaaggcgtcgcaaggctcgatgaagagcccgatgactacatagtccgagaaatgattccttataatggcggggaggagaaagagaaggaggaaaagcaccggaacgggactccaaaagatccaatcgccggtttccccgctctcgacgcctctcgacgcgcgaatctttcaccactcatgctgttcgtgtttcatttcctttttgccctacatatggtggaattgattgctggttcctatatacctttgacattattttggctatatatgttaatgcacaatggttttgtggccgactaattggggttgtatcttccactagcacaacacgatggagcaatgagagagcttgcaagcgaaagagagttgattgataagaggacaagacacaacatacaatactgtatagggctgccgatattctcccggtgtgatatatcccagtggaaaaaacagagaacagagagagggtaagaaaggtctaacatggattgacggcccttgaaccgcaaaactcgaccttgaatcctcctatgctgtgagaacaataagatcatcaagaattaatgttcttatgatccacatcgtctcaaattctgtatgtcccatccttcgtaccgagtgtgcctctcatttcgggccgaacccgttttcagcgtcggcaagacaactttggtctagttgcgcaatgcaactcgtagcatccattcttcccaacatatagatgatgtagttattcctccgaatatgctctgggtgcattggtggttggaaaggcgaaatgaggctttgagcaaagccctccggaggggttcaatcacacgcgatcgaggttcgttgcactagttggctaggtatgggttgtactgcgatcagcaaatccatagccaacattgaatcaatccctcacaccagctctgagatgctggattccctgtggatgcggatatcgggagtacctatctgggagatgatcggagggcgggctttttttgtctcccattagaggtttttgtatagactgatgaccaatgaccaaaggtatagtgcatggtagcacctagaagatcagatcgaacatgtgctctataggtgcctagtctgcaaagtagttcttcagaggcgtgtacgtgtaatgccacttctctccgaagtcattgggtagagggattgccgaaagtagattagcctgatttctaaattcccgtgacttgtctctttctcttcgtatccctcaacccctcctagtagttattcaagttattcatttgtcttgtctctaacactgaatctggaatcgagttcactcgattcccaattttggatcctcgtcccatcgattttggatatcgaaggtgctgagtaatagcaccattttgtgggtaggttgatattcgtgtctccgggattgtggacagcagaggaacgccaggattggattgaatcccagttgcatgttgatctcactgcctgtacgcttctcgtgagcttatttttaaaaggacaaaagcttatgactgcggatcacagacattgaagacattacttgccaattcgacattcaacactgtccccgacttttggattattggccccttgacaagaaaatacggtggcgggggataaaaggacagagcgaaagggctggaatatcatcctcttagcatcgtcggcggttgatggcgagcgtggatatcttgcatgatgacagctacattgagtatgtctcagggacatttggtccggatgatcggggattccccaattcaggaaaacgatcaactagtggactgaatactgacgatgccatgtagacggggtgttcaattcgtcccccgatacaccctctgccatttaccctgatcgtttgatccgtcctctacctagacggaccctccgttcacgcctctcctccgatgctgccgacacactattctatcctcctacgccgccggcgtctcaaatattctatggcgtctctgcggattctgaagaggcggtgaatgaatccaaagtatatgtgcagcagacagtggatactgaattgtcaccggaggttgagaatcatgaatttgagacgccagtagagttggaaagcggtgatgaaagcggtccgatggttgttcgaaggagtggtgttatccggagatcgtcactatcacctcccgtgtctggcaatccacatagcttcccccacgacacaccgcagacaaaatcttcaaccggggacggctacgacgcgtttgagaatacgaataacaagaaaaagagaaagatacctacccccgggaacttgggagggcaccattctgccttgtctccggagttcgccagtatgggcttgacaaactcaacccccgtacgggcccctactccaactgatgccactggcacatattatgggagtggaaaccccgcgtctcctttaggaaatgggatatctggttcaggaagaggtcggttgggacgtcctactgttcgtagcagcagcagaaacccgttatcgcccaatgcccagcatggatggttgaatgcccggacgcccagtcggcgagacgggttgatgccatcccctggcccttctggtatgcaattttccattttcccattgcattatttgctctaacttctgtaccaggtgaatcttctgaccagggaatcatctctaccgcgatcgccaatgccgcaacgctctcttccccacctcgaggtcctggcaacgtcagccttttggaaaaagagaaagaaaataccactccgacgaagacacaattcacgttcacttgtgaatctgactcctctaagggcatggcgatgcagcgaaattattcaatcccttatcgatcccccacttcaccactcggtccggcaagtcaaaaacagaggggcatctccacacaagggacacagactagctccatgaaccaccaggccccacccgcgcaagcacccgctcaaagtggggagccgacccccgtgggccccaagaaaaaacgatccccaagcagcacatacgcattgtctgcacgtcaacgcaagatccagcaacaatacacgaacttccaccatccccctagtctcgaggatatctggatttgtgaattctgtgaatatgaaagcatctttgggcatccgcccgaagccttaatcagacagtatgagatgaaagaccgcaaagagcgcaagcgactggcggagaagaagcggcttttggagaaggccaagatgaagggtcgcaagaccaagaaggcgacgaagaacgcatcgaagaatggctcacagcagcaggcatacgaccgcgcttcggctgacaactcctccggcggtggatcaggtcttcccgatgatgaataccaaggacatgagtatgatgatgatgaaaatttgccgatcccaccttctgcccctgcgtcccccaccgacctcaagcctccactaccgcccactggaaattatccaaagatagcggcgtctgttccaggcatcaagggtactgcgaattctggagcaagtcgaccggcctagtcgtccttctgcgtctcattggtgttcttttgcatttcatcagtccatcattgcatttggtttttattttcgggttgacaggttgacagggtgtatggggtattttttggaggggtgttctcgggttgttgcatggaaggaaatcgcctctcagcatgttggtttggcgagcaactcatcggacaaagtcccttgttggagtctggttcctggttatctttgtacttgtaatgtccatgatgtgtatgttctgaatcaaatgtgaaatgatccaatgtccagtctcgtagcatacattcttttcttagatcatctgtttaacttcatttgtatataccgaaaatagagaggactttttgattggatctcgagccaccacacttgaaactatcccaacctcaagttggcgcgcgcgaactgcaaccccactagataccaggtttcggacccctgcaataccccagcttgctagctttgtgttagtttttgattccaggggtgttcggtgttctattttgatccatgcgtttcatcttcttgttcccgagtgattgtctttggatgaaaggcgaggatggacagtggggaagctctagaaccgcgcgctcgaaggagatgcgtttcatccggggccgcagatgccagaaaatagcagaaaatagcaacattgcgctttgttgccttcaagttctgacgaatatgccccggggactgagaatagggctaatctataaagaacagccccgggccattgatgagagtcttccattctattttcatgcatctttctttcattcattctcttctatttctattatacctcttgaatacgacgggccactttctctttgtcccaatatctagtcatacaatctcgacaatagcttcattcctcttatttggcatctggtctgccgaatcttggaatactcctctcattatctcattcgacttcatactccttcttctcgatataatatctgcgctgtgcgccatatcctaagcacttactattgctttcattcgcaccttccaatcaacaaccacctaccacatcaccataccaaatccaaagatgtctttcctagccgtcccactcctcaagctcggcatatcccaagccaagaaacacaaagccaagaaagacctccaaaaacaacaaaacgcctacccaacctacgaacccgagcaacacccaatgagcggctacccagccggcgccacgccggggacaaccctccacttctctccaccacaagagaaaagcaaaagcgccaaactagccttcatattcttttcaacgttgcgcttcctacaattcgtcttcggcctcaccgtcattggcctgtacggcaaagacgtgcatcacgaccactccgaggaagacacctggcacgcgaaatgggtgtacgcgctcatcacggccttcctcgccaccgtaactgcagccatccacctcgtcatgccgttcgtcatgcgcaaagctaagcgcggcgtcggggctggctccggttccacgatgctgctgctgccgcagtttgtgtgggaatttgtggtttccgtgctgtggttagcactctttggcatctttgggaagatgtatattggtgttcatcctgtcgtctcgaagactgatgctgcgacttcagcgcttggtgatgcgtcgaagataaatcggatgcgccatgcggtttgggttgatattattaacttggcgttctgggttatgactacttcgtgggttctgctgcgctggttgaagagtcgcaggtcagctggtgcgcttgatgctgagaagggtgagcaaatttaggtagttgagggtgtgaatgctcactttgatagtgggcttgatgggtgagatctgttatgggcagatgccttgatggcatcggatggaaagggagtttgaatagcatttgcattcgtttgtttcttttgtatctgacatttggactcgggagtcatggtgttcagtgcttttggctcttttcgtggatggcgttctctcaatacatacaaaacattaacgttctttttgagatacaccccgatgacttcaatttcaatgtagtctcatctagagattaattcctttccgtcatttacttgaaaaatactgagagctacatcagtagcttcctgctttcttatagaaaatcaaccgcttctctttttttctctcttagctcctgagccttacatcaatatcgatgcttttgattcgctcttcctgcctcgtagccttgtaagaagtccgtgtcctaccatgagcctgctgggtaggttcacttggctgtacagcccactgctgtccccgttctcaagggagcttcgttgctgtcatctgggataaagagaatgaagttgtgatctctcactactgagagatgaaccttgacctagaggctcacaatttctttaggtaaggctcaggttactacggaatacgaggtgaaattcggttagactccaatacaagaaacattcatatgcgacttatttatttctgtagattcgctggctaaagcctatcaaataggccaaatctggtatcccattcaacagatatccgcccagtctccctcaatatccccaggaacgtcaaactgcggtccaccaggcaatttgacggggttcttcaccactttgaacaatggcttcaccttgctgacctcctcagggctcagcatcgggcggcggagagtggaagcgcgcgggaaaggaataggagatgttgctgctgcttctctaatagcctcctcagcgacggggtcatcgacaaagtcgtcgtcatcgaatggtgaaaaggatgggatggcgggctttggcgcgggggcaatctcatatcccaggttgcgcgtgatctcgtcgtcctcgtcgcggaagctgaggtgctgcaagagaccgagctcgacatagctgtcttcgtagtcatcggccttggtagtgggctcagagcggcgacgggttggaattgctgttcttgggatagacacctgcgaggacttgcggtggttgaagactgggcggcggcgtgggcctcgtccgtggcgtgtcgcagtaaggtaggtcttcttgggaccatgctggctcaagctctccagggcagtggtcgactcagaagtcatggatgtcttcttggagtcctggtcgccgactttcttcggagcagtcaggaatgtcttcttggaacctcggtcgccaatgtcaattggagcagtggcagactcagaagctatagatgtcttcttggaatcctggccgccaaccttctcgggagtgagggtagacttggcatccgtcaaggtcttctggcgacgctgacggcccgtgttaccgggagtagaagtggaagtgtgatcaccagccatgcttgtggtgggtgaattagaagggttgagtgttatctttgtgccgatgggagtgtcaaggagcaatcgagttgctttatatgtttcaacctgtgaaggctgcgactttctcacgattgagagaggaggagaagaggctccgacagcgcagcctggctgattcttattgatgcgagcacatgagtcactaatacgcggttcatatggtgcgatgtagaacgcatttatgtttacgttttctcctttgtcgccagtcacaggcaacggtgggacagtcaccctttgtccgactaatattgccggcgccttaatgcgtagtataagacgatttagggtacgggtattaacgcggctcgagagtcgttttgcaccccatattctccagaagagatgttcgaggcgacgctcggtctcatctttgctggccaggtgcgatgtcgagtaggctgtttgttgtcagccagcccgtttataacgagaccaggagtagggagtgttatgttaccttgccaaaggttcttgtataagccattacttaatgtaccctgctgcaagatctcgctagcagacacacttgacatagccacaagaccttgggggagctttggctccatcttagatgttcgttttggtagtcgagcttgagatgacgagataattttgtacggagaagtataagatgagtggcagagaatttgcaagttgacgaggggtcaaatgatgttgaatggcgtggatcagtcgtactgatgtaaagtcaaggcttggtagcatcctttgtattcagcacaaacagaatgctgacaagaaaagaaaaaagagaatagaagagcttgaccggcaagtttcgaaaacaaaagtttcttgcgttattcctgtgtcgcactactttccagtggcgagatgagactttgaagctgcaagatattcaaggttgaacttgaagccgaggtaacacatcagttagagccttcgaacatgctccattggggtttaggtgcgcaagtcatgactttaaaagctgcactccacaaaaaaacagaaaaaggaaaagtcgagaagtccagagacaaaaaatttgaggaatgtagtaccccagggttcgcccttgcctgtagggtggggggaaaccccttagattcagaaccggactgaatagatcttcgttaaatctccaattgtagatctccctagatctccctagatctttccgaagccttggaaagactaaattcttcaagtatgttgtatgtatgtgcctcgcctggatcaccgggatgagccaggattggacttcaccattctatattatataaaaaccatgaaaccacttactaactactcactaaaaaaagactaaaacataaaaaataaaaaagcgtcatcgttacattccaattgcgcgtcctttcgcaagcagggatgtacagccctattgacggccaacttcctaaatatgacacagaacaccccaaatacgacctggagaaaataatcagagcaaatcaaggagctttgccgaggtgacattcacacccacatgccccttcattcggtacatccaatagggaacatctttcaactatgcgggggaggctgtaattgggtttgtattttctccgggtttctgcaaacgatctagaagatctaatcaaaaaattatgctcgaatatcttcaatttatcatacattataaggtggtcataatctatattttcatagagatttactatgcgatgaacatgccactaagttgacacgtcctaatcatcgtccgtctacgtttacttttagtcttaacatctcactcaatagataaatataaccttcgaagcgtctcagatctggcaggggtattataaatggattaaatagcataatccggagcgtctagatacaaatgcatacacatctcggtccctgcactatctactcgcgaagccgaagcgcaacaacctgcccaccataagagacacccccctggtcacctccacgagtagtaacataagccaatttcccacccggcacgatctgcacagaagtagggccaataaaagccaagctatcacccccaccagcaacgacactctgcgttccatccggcgtgatcttagcaatggcattagacggctgcgccacataagcattaccactagcatcaatcgcaaaatcatcccaatccgaatccgtatcgccggcctcgcgcaccaactgcgcaatgacctgaatacgaccgaaagtccccccgtcttcgctgacagccacccgggcgaatatattaagcgcactattggtgaagtacacattacctccgacaacctgcagaccattgatgccgatgggcatggacgagttcgcaggcgcggccagggcgtcgttcttcaacacaaccttcgagacaccggtagtgatgtcgacgcggaatatggatcccaaccgcgcgtccgcgatcaggagaatatgcggctgcgacggcattgaggccatgccgtttagcatatcggcgtccgggatgtgcgcgacggtctggatggtggggtttgtggcattcttgctaaagtcgacagtgtagatggtttcgttgtcgtagtggtatgagccccggactccgcctacgacggcatacttgtcgtggccgacggctgcaatgccggttagagctgtggcgccggggagcgcggcgactagctcggcttggggattgcgggcgagcgggttgattgtgtagagatgggcttcgtagaatgttgtgaggaggagatggccgttgggccggagctggctgttttcgatgttgattgagctggtgaagttgaatagttgggttgtcaattgggcggctgtggcgctggccaccatggccaggctcaatgtaggattgaaacgcatggtacagaataatttagagaaattataggaatgggatttcaactaacaaagaggggtttttatctacattgttgtggaaggactttagctctgagggatcaagtgggttcggcacggagcgcagaagtggtacgagtcggagatgacaagagatcgacgaagtagccaagacgggaaattgtccatttgaggctttaacaggaaatcagcaccgagctatggaaaaattatgttttggattaatgaggtgataatgggtgtggataatgacgctgtgtcttttctaacattcactactatgcaatgtcctagttctagagaccattgttttcgttcgactatgttcgagtatgtttttagctgccctacagaccactgaatatagcgcattgaggggagaataactagctacctgttgtggaactacggagctacggagttgaccttcaacattttgaaaagtataagaacaagccacacttctgttgaatttcccgctcaatgcggagtagacaaatacaacactgtaatccacacgatagactaaccaaactgacttgtagtccgttaaatgtcatcttatgtactccgtgctccggcacttgtactaactcgggcgagcatccgattctcggccgatctagtcccagataataaatatgaagtctcgtgtgaaacttcataatctggtaaatcaggactagaaatatcatcaacccattgccttatgcataatcgggttggcgccggcactacccagtggagaacctgtatgggaggcatcaaggtcattgttggcaatgctttccacctctgcatccgactcgtcggtgtcgtcgcatcctgctatctaagagtccttatatataggctcagaggatggttttccttcatgatttgctaacaaccatcgaaaaatctctaacgaggcttcacgtaatgtatcctgcgttaaagaaggaggagtatttaactgagaaaagctggagttcatcggtgacacgttagactgatctgggtatggaatggtgggattatgaagccgaaaccctctcaagataggccagagtgtgcctcgagtatttcttatgtttttatgtccgtaaagcacagttcttctcctttgtttgccctatcgggggccagggcgaaaatgagagactattgtagtgcagcccatcatcctccgtgacaggaagacataagagtctccagacattggctcttttgattgcatattccctaaactcgtcacaagcaaaatatggacctgatcctgcaaagtccataaaattctgtgcggaggatgtccacggaaacccactcggatctagaggaggcgttccacttttagcaaggtaaataacctttggaacaagtccactcagtgcagctcctactcaaagagcagaaaggctcggacggcgtattccgcacatcaaagtgatcaattcaactagggacctggtgcctctgctagttccgatctcgttggcaattcttccacaaccggatgcagccaagaactaacaaggttgcagggaaccccaggctcccaaaatgatccggaaagacttgacatcacgacgctagggttgcagcttagggccatataataggcaagatcatcaccaagggcaatatattcgttccccaatgccttatccgaaatgaattctaccctgccaagtacaatggttggagatgacaactcaatcctgcgtttgtaatgttgattcgtcggaaatgtcaacgctgctgcaaaagcgccaaaaaattgatctccaagaccatgcagtaggcaaaactcagacagggccatcaaggcctctccagaggaaagtggaaaacaatcggcgaattctggcgcagaagtccctatgccttgccatagaatttcgaatagttcatcctcgcctaagtcaatagaccaaggtgccaggtagacattatcgtttcttttggtcaagaccgctttccatccatgcttgggggcttgtatagccatccaccatcgagcaacgttgctttcggcttccccgatgtgaacttcaattggtggtgcacgctttacctcgtctctatccaccccatcgaccgcgcgagggtttgccgttgagctagtgtaaacaagctcggctccatcgtgcttttgaagttccaacaaacgggcggaaagaatataggaccaagcaagtgtgaggatacaatatagtttgaagaatatggcttagaagttcgccagtgatggaaggtgtctccggaaactgacaggtgattggctgaagctgctcgttgtttgagggcattgcgtagaggaggtacgtgagaattcgcaatattcggaatggtaaggctaaaggtaatgtacatgagttaacgaaatgttcgcaagaaatatgtcttcggatgttgtttaagtgatattgttctccttatcccttgcttggcagcatgcgtactatggtaaccggtttgacacagtattattttcaatttcaatttaacaaaattatgtttttggtcttcaacaaccaaaaagagtgtagtcaaatcaaaatactaaacatgatgagaagagaagagagaggagttgccctggtgcccggccatgcgtgaccaagcaagaacaaacaaagcaaacaataatacgctaattttattccacagctaattgcctatttaggcagggggtgtctcagatttcctttttcggtaggactcaggggtctagaccagcgtgttcaagctctttttgtggggagctatgtaatgtgataggctcccccacaaaagttcaatagactcttagaaaagagtatcccgcaaaacacaacatacgtgaccaaattatcccgcaactcatgccgtaaaatatgaccggtctatatcggattcatatccgtgtcaaataaaagctagcatcatgtaagagatttaatagtgcgcagataacatgctcaggttacggtatagcctccgtcaacgcggagatccgccccagtgacgtacttggaggcatcgctgagcaggaaggtcacagcacccatcaggtcctccggtgtacccatcttgccggcaggaatgagggagatccactggtcgcgaagcttggggttctcctcgaggatcttgcgagttctgaatgacgaagaaagacatcagcaacaatttcttccggaggtctgctcaaatgtatctcgtcgtccatgtaagagttactcacagagcagtgagcatatagccagggctaatgcagttaacacggatattatgactggcccactccacagcgagcgaagcagcaaggtggcgtacagcagccttcgcggcgttgtacggagcctggggctggggaacattaacgatagcgccggacatggagccgatcatgacgatgctcccgggcgccttccgctccatcaggtgcttagcaacattaatggcgaaaaggtatgtgccgtcgacattgacaccccacagcttctgcatacggtcgaaggggtagttgatggcctcgaagttctcggtgaagccggccgacgtgaccaggttatcgatcttgctgtgcttggccaggacttcggccatcgcattgctcacagagtcggggttagcgacgtcggcataatgggcggtgaccttgggcatactgtttggaattagccactgcggcgagctggaatggtatgataataaactgactcttccacaccgggattctccttgtggaactgctcgatcaatgaggcaactgcggcctcggcttcgtcctctggggtatgtgttaggataagtcgcttgttccggttatctgtagtggtcgtaggaacttactattaagatcaatgatggccaaatccgagccggaagcaacgaggccttggcccatgactagacccaagccacgagcaccaccagtcaccacgctgactttcttctcaagtgagaactgggccaaagtacgcttgaaatgcatgccaccgcgtccctgagccacgggctgagtgggcatctcgttgtcgggagggtattcgatttgtacgctttcatcagtgcgagcaaatctgccctccttatcactagcagcaccctcgggagccttatttgtagcagagaggatggggtcttttgcagggtcatcgctcttcttctttcccagtgaggcggtgtatgagagaggacgtgtgaggcccatcgctggacgggcggctgctaatacaggacgggcggccttgatggcatcgcgtgcgactgccggcttgaacattttgaaggttatagctccaatgcacaatagagctgtagaggtatacggttgggggggacgcgacgtataatgtacgggagaataatgttggggaggaaaaacggtctagacatccaggggaaggtggacgtatcaaacaaagcaggtcatcaggtcatcaggtcatcggacctcatttgcattttatttttctcagagcccaagggctaagaattgagacacttgcggtgaaaaaaagccaaaggatatcggagggctattgactgcctattttagtctcaagctttgttttatttgtttatttactccaattgtagctctaaagaatatagaaagctagatgggagactatgatgtcaccaatttagtacttttgtttactattattattcaagtactacgtatgctctctaatgttattctcattcaaatcccttagaacttgatcataacgatggaagagctacacggacttttgcctatttgctaaaaccagtcagtttcgtttcggccgcattttaccgcacgccaatgaagtgcttggatgcagctttcggattatcatctgatatacgtagggtgcagctttttctctcactatcctccgagcctaaaatgttgttttcgattctctgtaattgtaaggcgaaatcgaaattgatagtgtgaactccatatttgtgttaattttgggaggtatccccatgctgaaacttgtacctctataacaaaagtctcgctctattcggattcggcgaattccaccagcggtgttccgcttttgcattgatcctgcaaggcacatgttggtcagctgttctcgagtcacatttctctgggggttttggagttcaagggggtgaattaaaaacgctaaacatattcaaacgaaacaaaaaagatgtcatgggggtccaggaaagtccaggaaagtctggtcaggggaaaggcgcatgacttactcctcttttgtgcacgacccgtgcaatggttccccgttggggactgcgaatcaccgtctccatcttcatgctctcgatgacaaccaacggctggtctttctccaccacatctcccgcctgcacctccacccgcagcactttacacggcatcggggccaggacgctgtttgtcacatccttcagtcccaatgccttctccatccacttagcccggggcaccgtgagtcggtactgagtcccacgctggaatgcgataatagtatcctcgtctcgaattactgttgtatctaaccgggtgtgcgggaaaaacgacgtgacaatgtgcgacgctggatccatgtggctcaccacctgctcgaaaactcgtccgccaacctccacgttgaatgtgtcatctgctgtctgctgtactcgcacactgaacgtggagccgtcggtagaccctgggccgccggtctcggtaaatgacaactgtcgctcttggtaactaggagtgaacccgaccgttgagcctgcaacccctgctgaggatcgtgcccctgacgtggcgtcgcgatgtagacatgccaatgcgacttgcgccagcacttcctcctcggtggtctttgggggaaagagctcgtcacggtgcttctcaatgtagccggtctcgacctcaccagcgatgaaatccgggctcttgcagatggcttttaggaactctatgttggtcacgggtcccgcgatctcatattcttccaaagcagcagctagcttgcggagagcctcctcacgggtttcaccgcgcacgataagcttggagatcatgggatcatagtgggccgagacatcgtctccttccacaaatcctgcgtcaatgcggatgtccttcgaagtagccggcgttcgcacatggagtaaacgccccgagtcagggataaatccctgttctgggttttcggcgtagattcgggcctcgatgccatggccactcttggcgatacgctcttccacttcttcttgcgtaaggggcagcttggctccttcagccaccagaatctgccagtggacaagatcctctccagtgaccatttcagtcacgggatgctcaacctggagacgggtgttcatttccataaaatagaaatcccccgagtcattatcaaaaatgaactccactgtaccggcaccttcgtagccgacagcctctgcagctgaccgtgcctttgcccagaggtcctttctagttgcatcagggagatgaggcgccggagattcctctagaaccttctggtgcctccgttgaatactgcaatctcgctctcctagtgcaacggagttaccatgcttgtcggcaaatacctgtacttcaatgtgccgcggtgtggtgatatacttctccaccagcacattatcatctccaaacgagctcatggcctctgacttagccgactcaagctgagcttgaaacaccgctttggaactggcgatacgcatgccctttccaccacctcctttgacggctttgatgagcactggatacgtgatcttgtccgcctgctcctcgagaaacgcagggtcttgattttggccatgatagcctgggacgcatggtacaccagcagctgtcataatctctttggaacgactggtaggacacgcctggtaagcatagtgaatattcaaataatgcaatgagcgtacctcttatcacccatatcctcaatggccttatacggtgggccgatgaagaccaacccggcctcggtacatttttgcgcaaatgcagagttctcactcaactgcataacaagctcaagttagtattccatctagaatgtaaatatgcacagccgacttacaaagccatagccagggtggatcgcttgacacccttctctctttgcaatctcaataattctatcaccatcgaggtacgccgaaaccgagcccaaattaaaggcgaagggggagctcaaggcatgttgtgatcggctgtccgggtcggtgtagagtgttgttacgcggatcccacgttccgcggcagtgcgtccaactcgtctagcatatcgaagttagcaccagaaattgcacatgattcagtgcccaacatacaaggcaatttctcctcgattggctataagaattgaatctaacgatttgattgtatttggtgtgttagtggtcgatgatacagctcgcgatgttccgcgagtcgcggtcggggttaagcggggaacaatgcggagaagggatgagagggtcatgacgatgggagaacagccttttcagctgtaataaggccttttcagagcgtaattcaaatcacaatgtaagcataatcaaggtgctttgaagggacaaagtagagaatgggaaaatgtcaaggatttggagaagctcctgttgagccgatgcaaagcgagattgcggggaaagccgagggtataacataatcagccgtattgggagatgcatggatggtcacgaggcctcgtgggtcttccacccagtactagtactagtagatatctgaaaaggtccttcatagctgatcgagtgaataaaaaacaccgtagctgctcatcaagtgaagaaagagtgatactaccatattgttgactaccccatggggaaactggggattccggggtggatcacgtgagactcatatacccgctgggtattggaaaatacccctccgtaccttctcccagttctcctcattactcccggcttcaacattacgcttcacccttgtcaaatggttcctccgaacagtgattttatcttatggtttagtggacttcctatctcggctcccgtggtgccaactaacaagttccacgcttcaaattatctatcgagccaaatctcccaaacttggtaaagtgaaaatatgactgcgataagccttccgattacatatcgggagatacaaccttaaaaccttggaataacggcggcaaatctatctcttatcctataagggtatggaataaagcaagcccacgaggcgaccttgattgccagctcataccttgtaatcatggtgatatgtcccggacagaccttcccagataggaatggtgcctgttaactacatataggtatgttgtgcgaatacgatgatgcgtttccctcccttctgtttatcctatgttattcagggaccgctggggaacccagacagtcgaatcacggtcgctttacaggataaggtcaaaattatataacatctgttaagcttgtattcatgctgtcaggtatatagtaattatattaactttgcgccactgcgaaggcctaacctagagcttattgatgcaatgtagcaatatacatcagtatcagccaaaatgatgagataaaattgcggcagttcgaagaaaaagaactaccactacagaatagtgggtttcagctgtattttgctaagcgtcgtggcttaaaagattttgctgactcctctccctcgatcttgggcttcaaactcagccccgccatcctttaaccacatcgcatctcccctgcagattgtttgcttgcaaaacatcattttcgggaaagcccagtatccactggatcataaatcttcaaaaatggaagacccagaccggaaaatgggtaaaagtacaaagatgaccaacaaactggcggcgaagctagcgaaatggagaaagaaggagaaacccgacgtggaggtgcccttgtcgtctctccgaccgcagagtcaaacacgtccgagccttctatggtaaactatgtacagccttcagatggccttactggaaatcccgacaagctctccaaacctgctttggtgacttccaataccatgccggtctcaagtcttttcgagcccctctcgctggaaacgaccgacgtgcagcccgaaaatttcatacccggtccatcatcttctcctacgaccgaagacacctgggcccgggcatataaactcttgcaggctcgagagcccgagttggtaaaagattatcagactcatttgagcctagcgcaacccgagaactcagagcacataaatctctcaaatccacactcagttgagcgggtgataaagcagctgctggaagttcgggaccagaagcagtggcgagtctcactagtgggaaaggaggtgaagatacgagagcaagccgaaaaactagttaagtttctcctctgggccgaaccagccgtgaagaaagccgttagcacccagccatatgcagcattggcgtgggctggcgtttcgctgctcttacctgtaagccaagcaatcctcctattatctagccaaggctgacccagacagcttctcacaagcagtaccactagcaatcttgcgatgcttgaaggcttcgattccattgatcatgttcagatctactgggatatctgcgagaagacatacttgcagtccaaggatggggaagagtatcaagctctcatccaaccccttgctaaggtctactcttttatactcgaataccaagcacgtgctatctgtcatttctcaaaagctcaagtctctcgcgcatgggagaacatgacgggtgaaagcaattggggaaaaataagattaacaatcgaacaattgagcgataactgtaggagctatgtctcccccctcaaacttggggaggttcgccgtcatcgagatcgtcaattactggagattaaagagtctcgggttattcttgatggcattttggatgtcctaaaagcggacacgagtcggaaccagaagaattataaagaccagaacgagcgagggtttcttcaagcacttgcgtccgactacgaggatggcaagaattataacccactgagaatcccagggacatgcgattggttcttacagggtgacgtacttcgaaactggcgggataacgaccgctccagtcttctgtggatttccgctggacctggctgtggaaagtcggtgttgtcacgggctctcattgacgagaatcggctttctacgaatatttcgacatctactgtctgctatttctttttcaaagatggggatgagcgccgcgtgtcagccactgatgctttgtgcgcattgcttcaccaacttttcacccacgattcgacgggcacactgatccaaaatgcaatgcccagccacaaaaatcacggcccaaatctagtacagaacttctctgagctgtggcgtctgttcatccaatgcgtcagctcgccagaggttggagagatagtttgtgtccttgatgccctggatgaatgcaatgatcatagcagtcggcaattgatccgcaaactaagggagctttactccgagccccaagtttcatctttaacctcgaaactgaagtttctgatcactggtcgcccttatgatcacctggaggcatcgttccaagatttccctgatacaacaacttgtgtgcgcttggacggagatgaaaagaccgccgaaatcagcaacgatatagatctggtcatcgatgctagactacaaaacctcgcccaaaacctcctagagagcgaccgtcaaatgatttcagatcaactcaagagcatggagaatcgtacttacctctggctacatctcactttcgatattattgagcatagccggagtgagtatggtcgactgtccgatatgaaagaactattctctgggctgccttctaaggtctcagaagcgtatgagaagattctggatcggagcggggaaaagctccagacagaaaatctccttcaaattgtcttagctgcatcacgacctctatcacttgacgaagccaacatagccttaacgatggctttgagaaagggcacttttagttcttacgacgatctccagaaagattcttggccgagagataacttcaaaggcgttgtggaaaatctttgcggtctcttcatcaatgtgtacgattctaagttgttttttatccatcagacagccagagattttctcatcaaccctcctcggagtggaaagtggaaggggcggctgagtatgcaacattcacacgcgaacatggcgctgttgtgtctatcattcttgtcgtttctagatgggcaatcatcagtggagcaaatcgaggcaaagtttccgttggcgcggtactcggcccagcattggatggatcatgcacggcctgcggagacagagaacgaagtccagaaaagcgtcatggagtttttccttcaagaaaatcaagcttggggtgagctctttgagtcgatttattaccggcggtcatatggacgaccccacatcctggcaactccactatactacgcatcgtccttcggtctccaacaaacagcacaactcctattggctaaaggcgcggatgtcaacgcgcagattgacaattatggaagtgcactccaggcggcttctgatagaggttacatagagattgtggagctactgttagcccatggcgcggaaatcaacgcacagggtggcatttacggaaatgcactcgaggcggcttcctctggcggccataaagagatcatggggctactattagccaatggcgcgggggtcaatacgcagggctcttatggaagcgcactccaggcggcttccgttagtggtcatacagagattgcggagctgctattagccaatggtgcggagaccaatacgcagggcggcttttatgggagcgtactccaggcggcttccgttaatggtcatacagagattgcggagctgctattagccaatggtgcggatatcaggacgcagggtggcttatatggaggtgcactccaggcggcttcctctaatggtcataaagagatggtcgagctgctattagccaatggcgcggagatcgatgtcaacgctcagggcggcttagatggaaatgcactccaggcggcctccgctaatggtcataaagagattgtggagctgctattagctcatggcgcagagattaatacacagggtggcttttatggaagtgcactccaggcggcttctgcttgcggtcacaaagaggtcgtggagcttctattagctaagggcgcggagatcaacgcgcagggaggcttatatggaagttcattccaggcggcttccgcttgcggtcacaaagaggttgtggagctactattagccaagggcgcggagatcaacgcgtagagcagcaattatggaagtgcactttgttgaaatccatactggctttccaatacgtacggcggttcaatggcatatatattcctctcacttcttgtattatttggatctgccacattgaatgtagcgaggtttccaatgaaagccttcatgttgatttcgtctagcaatatgtgttggtgaagatatgggatatgggggttgttacagggacccctccctgcctgatttttcagtattcggcttaccgacctccacaccgactttgtgtcgaactccggtagatacctacagcatgtatataaaccactaacaaaactaagtcacttttatcacatcgtcaacaactaaactgcttcaaaaactactccaaaaactaccccaaaaactgctctagcatcatcaagggattaaaaaatgtaggcatgagataatatacacgttttttctgatcagaatgtagggttttttgacaaaagtgcagaatcaagtctagcaaaattgatggttgattagtaagacaggatactgaaaaatcagacaggaggccgaattagcaatggggtccttgtaacaatccccaagatattctactttgtgtaagcttggttctgaagcagatagggaaaactgaccgtgtctaagttgtcaacctagaagaggatacggaactctcatcatcggacgaggtacgaaggcgacatagacttatgtactgagcctcagtgctttcacctccgctttatacgctgcatgaacgatcgcaatccctcgtgttcgagccacaggctctagctgggctattgcggacatctacatagctctccttttatagatatggcggtatatatataatctgttcagcagaaatccgaatagtcctagtggtcgaggccattacattcaagacaaagggtaacgccaaggacctttatcgagaacagtacacgtctataggtctctatgctaggtgtattggaaaataccaaacaccatacctctctactttctttatcttacccccacgcttcaacctcatcaaactatggggtattagtagtctcggctcccgtccgtgatacaccaactgacgagtcttgggcttccaacttatctgccaagctaaccttaagcagatagaccaaaaggaagactgcgataagcatttagatcatattcgggagatataaagatcagtcgatctatctctcgtcctgcagggttgtggaatggtagtatagccacagctcacgggggcaatctcgattgccagctcatgccttagaaaggacagcaagcattcaaacttggacatgcggtcctataatgttaatgtgatctcggtgacaatcccgatgatatgccccggacagaccttcctggataggaataccttatctgggctgtagcgcattgcccatgtgagtcaatctaagccgagacgagtactttgcaactataactttagtttcaccgactattaaagaaagtgcttgggttcaatcatgtctttcacgctcgtagaccataattcttgtttttaaatttgaaacctaacagtaatttcaattaccttgtttgggttccggctatttcgtcaacatattatgcccatgatgaatcctttcagcgtgctgaagcaatatatctggaactcttcccaaacccccgtcaaggacatcaaggaagaggtattcgatccgaaagtatgtacatctagagaaatatcgacgcttaaccgaaagaccacctctaagttctcatcaaacaggtgcacctcaactacaccccaccttcaaaaagatttacaatgcaagaattgcttttaagccagagcccaaccgcatcgccaattgcaggaacagttccattcccattattgtctgccgagggtgtcaaagcctaccggagagcgctattccaaaagaatgtcatagacaaatgtgccagctcgccatttccggggactttagtcctccgcgacgcggtgaaacagtcaaagtttgtcaatgacttttggaggcaccccgagacaatgaggattgtgtctgaagcagtcggtgtacctctggaggtggtgatgccaacggaaatagggcacactaatatccaagttgaaggcactaccattgcagaaatggccagtaatctcaaagctgagccggcggtagaaaaactcgagttgagtctcgaagaccgaacttacgaccctttgaaagatgcaagtgccatcattccgtggcagtaagttcataccctggccgccttgcttgtagcactgacgagactaactggctcaaagctatgactcgtatccttacgtttgtgtattgatgctgagcgacactgagggtatgatcggaggcgagacatatatcaagaagggagacggggaagtacagaaggtgtgtaagaaatatacttactgaaactaaaattcctctgctaaccaagccattgaaggttgagggcccccaaattgggcatgctgtcatgcttcaaggcggcgaagtctgtcatctggctgcccgggcgaaaggcgtcaaggagcgcatatcgactattacttcataccgttctacaatgccaaacgtttacgactccagctatattaccaacgtccgcccttatgcggatacaacctctctctatcctgaatggacacaataccgcttgcgaaaattaagggacgagctcacccattatcttgacgagatggagaaagacgaagagcctgccaaagagagaaaggatatacaaagccttatagaccagcagattgattatttacgacgaacctctcgacagatggttgaacctgagtatactcagcgagttttgagaaactatggcaggccgtcatactacgatgcacctagaatctgggagactgttcaatcactaccgggatttgagagacttgcatcagcggcggacgaggaacgacgttggcagcctgagagtatctattggaaagacctcatgagatccacggaaacaattcgcttagggaaaccccttcagagttctcttgggactgctgtgcgggagaagacaagaaagtactatatgggagatgaacttctgcgacaaggactcaatgaggcgttcttggattggttgggatactcaggtatttgggaactttactgcaacatttgattggaagacatcacgagatccgaaatttatgactacgactagttattacattacacaaatatattcgaacaagacacatctcctattgcacgccaagataaggatcagtcgtatgaagattgtctgtctgtagtacatagtatactgcaatatctgcaatacatcaagaatcaaaatgatattcgtaatttgattgtgttgggtcactggacagcccagaagagaggtgccatgccctcccccggcctgtccagcaacaactatataaataagcccttgagttagccactgaacagtccgaaagagaggtgccatgccctccctcggactacccagcaacaccaccctccatacattgaagttcagtttccatcatccaatacaacaagtataactcaatattcatctcctccgacatcaattcgaggcctcgttaaaaccagctggaagaaaaccccgtgggataaatacaaccagctggaaagagtgcctcgtacatatattgaatccaatttccgctcgtttcctttgttttcccttgaatttcctcccttgttttgttgtctttcgatatcgttttttttttaatttttgatttttgattgaatggattgcccaaagtcgtttggtttgttggttgtgccggttgttcgttggtttttgtcgattttggatatttatgttggcggtatgatattggtgttgatattgatatggttgatattgttttcggtgttgttgatattcaaatgattgtccgattggatgtttttctttcgtccgatgggcagttgagtccttctgtttgactcattgggtggtatgggttgccatgcccgttctcttcttcggagtcggttcaatggtaaaatggtggcatggcaacccatacaaatcttcttattcggggttcgttcgatgaatgggcaatcaattgagtccttttgttcctcgggactcatcgggtggcacggttgccacgcccattttcttcttcaggttcgaccggtgcgatttccaacatttttttacatttccagacggcagtgtcgagacattgtcaagagattgtcttgagctgtcgtagagctgaggcctcatcaaaaccaaccaggagaaaaacccgcatggggaaagcttcctagctggaaagagtgcctcaagtggttgtgtattgtagtaacaatttggtgtcaatgacaccgtggtgaatgcccaaccgggagaaaaccacgtgggaaaagctcccggttgaacgtgaagtgttcaccaagaatgttcaatatagttgcccgtcctatgggaaaaaccgccgatatggatggggatgagagagacttctatggacgttcaatgaaccagttccacacgatgtccacttcagctgcgggattttttctatacattaaagtctcaaaaatagaaatagtatcagtcaccaggagatttttagagcccaagttatctgtcccaaatgaggaccacaggcgccgcagtcctcacccagtacatcaacccgggtatcaagaatgcgaatgctcgatgtttggatagagacccgggccctagatctctccccaaacacggcaaagatgagagagagttagaatccaagttatcagccaccagcaaagaccacaggcgccgcagtcttcgctgaggacatcaaacccagatattgcaagttgcggatgcttagcacttgaataaaggctagggcccttaacccctacccaagcactaaggtgacgaggctttcaaaattcaaagcacacaggtagtttctcccagaataattcagtggatttgttaaattcaatgctcttcaacaggtgggagtcccaactgggacgaataacggggggcccgtcgtagcacaccgtgtgggatggttgtagaagaaaagaaaaaaagcagaggggagaggggaaggactgatatatatagcttagtgtgacgtaaacctcgatagtgtccgatatccaatcaagtaatcgacgtacgtcctgtgaaatgaaagtttagatgtccggtccgcatgagggaagtgtatatcgtacaaagacatagtacttctggtccattgaatgggctagtacatttgagaatatcacctgaacacttgcgacaccgtaaatggaaagcggacgaagttatttgatgactgaatcctaaaaatcacttgcatttttggtataatagctggccgctgttgtatacagaacggaaggcgaagtcaaaagtgcatacagaccacactgccatctcatgtgagaaaagctaaagaaaacccaaaagcaagtctagaacgaaacaaaaacaaagaagagaagcatgtctttacgaaaagctgcattgatgccttgtttccaggccgtgaactgcctgtgacgatcagggcacttgcccttcctgatcttcgactgccgtgctcgtactcactgaaataggaaggaacaatgggacagagtcgttccttcgcgattcagtaagcgaggtcacataaaacccagtcgcgagaacgcgcacgtagttttccttgttctttcttcctctgtacttagaattctgaatccaatgcaatcttttcccttggattgaattggcatgtcacactgccctactctcttagattacgtatttagcagagtccatatcctctactctacacatatttcaaggggattgttacagctcattgctgactcgaccccattagcaagacggtagatacctacaatttgtatataaaccactgacaaaattaagtcactttatcatatcaactacttcatcgtcaacaactttttcaacaactgttctatcatcatcaagggaaacatgtaggtatgagataaagtacacgttttttctgatcaaattgcagggttttcataactatctggtagatttaaagtgatgccttctatgtaggatagaataaggcagaatcaggcagagggtcgaattagcaatgagggaattccctgtaactaacaatcccctatttcaatactcattgaacaaaaaccactttctccgtcttcgtcgtcttctacgtattcaagactctccctctcaaagacagaacgcaacacagagcctatgttgtatagggtaaatgcgatgtagatctggagaaacgccaaggcttatgttagcaggattgctatctccttcaatgcacgatcagttcgatcttccctccatcacgtcagccgtgcatcctcgttttgcgtgtgctctacatatctgtacttgacttacgttcgttgaagtcttgtcattcatttaaccagcgccccctcgaaaccctcgccactcgatccccttcaactttttttccggtatccactacgagatgtccgacgacgatgagtactatgaatttgaggacgaatacatgtacgaggatttagtcccagacatggtcgtaagttcaatctaaaacacctcgtccgactctgccatcagtgctgcgcgagaaaaacagcgtcaattcagaccttaaccaaaaatttgcttatctaggacgacctcgccgcttcctcacactacgaagccgcgctatatgaagacccagggatcgacgtcgaagaatacttcagtgactgggactattattcagacgattaccacgatgatgacgcaacggtcgaacaaagcgcagagagaaagaaaagaaccgagatcgcagcgacaacatcacgacgaacgaagacaccttcccgcccaaaaggccacatcgcccgaatcccgccgacgaaatccaccctgatgccggatgtcgcctccttccagggcgtggtgtggaaaacacccgcgctggaccgggaccaggatgtcgccattttgtacgaaccggacacgggcgagaaagtcgcgcttctagagaactggcgggaagtcttcaaattttcccagccggcactggataggtcgcggttgaaagggcgacacgtggttgaatctaagcccgtcgattcgtcgctagctgacgatgaatctgatggcgcggacgacgagtctgatagcgaggacgagatgtcggatgatgtctcgtcgaatgcctcgggtgttgatgatggggatgctggggatgcgtcgaatacaacttcggacccggacccggactctttccgctcgctgaaactgtcttcgccgccgaaggtcgtgattccgttgaagagggggtggaagcggaaggcggttgcgctgaaggatgacactgacgatcaatcggcgttgcctccacagaagagggttgaggtgcggaagggcggtgatgacagggctacaaagtgtggtgcgacaccgccgatacgcaggtcgaccaggcagaagaactaggacggtcatgttaataatttcggatgtatggctatttacaacatgtacaataaatgaaatgaatctgcatatagtcttctaaagagatggcattgcccaaatgataatttgtgtataattctcttgcttaagcatactccttgttgaatgcgcggccaatgaccattctgcggatctcgcttgtaccagcgccaatctcatacagcttcgcatcccggagaaggcgcccagcaggaatctcgttgatatagccggttcctcccatgagttggatggcatcgagcgtgcattcagtcgcacgttcggcggcgtagaggattgcaccggcgcagtcatgagtgcgcacggccatctcgctaggttccacggcggcgttgtctacctgccgtgccgtggcatatgtgtacgcacgcgaggcagccagcttagtgtacatgtccgctagcttgccctggaccagctggttgtgggcgatcggtgcaccgaattgcttgcgcacgtgtgtgtaaggaaggacgaggtcaagcgcagcttgcatgattctggggagtgttagaatacgagagttgtgctggggtattggatggctcaccctaatggtcctgcactcaggacgagtcgctccaagtccagaccctccatcaagacgcggacaccgcgatttaactcacccaggacgttctcccggggaacgaaaacatcctcaaagatgagttcgcctgtgttagagccacgcatacccaacttgtctagcttgcgtgcgcatgagaagcccttgaaggtcttctcaactatgaatgctgtgatacctttggagcctagttcaggcgctgtcttagcgtacacgacaatgtaatcggcatcggggccctgtaagaaggtgtgagcaatgtgatcggaacttcgaagcccctctatatccccaaattacttacgttcgtaatccacatcttagttccattcaagagccagcctccatcaacttccttcgccgtggtcttcatgctgactacatcggagccagctgaatgctccgacatggcaagagcaccgaccttctcgcctgataggagaccgggaagaatgcgctctttttgttccgtcgagccattgagggagagctggttcacacagagctgggagtgggcggcataagagagaccgatgcttccttttatccagaatcgaggtcagatcaatgttcccctcagccatatactggaagacataccggatgctcgactgatctcctccatcaccacgcagtgtgcctggtagcccatacccaggccaccgtactcctcgtccgctgtgacaccgaggaaccttgatatatgttagtatgcgctgtataacacactcccttcacaaagaagagagtcaaccatttgagagaaccatacccagcatcacccatcttcttccacatttccgctgggaactcattctgttcatctgtccgtgcagcaacatcggctgggatctcacgccctacagcaaggttagaagtgcgacttgggttagagcatagataatgtacttgtgaaatcttgcacgcgctcccgcagctctaggagatcactctcggacggaggtacaaagcccgtggggtgttttgttgagatagagcggaaatacggggtaagtgcggggatgcgggttagccgtaccgcgcgtgttgaggtgcgaaggagagggagggttagggacgccatggttatatgagaaaatgtagaatgcaaattccggggaagaagtgtctttggggaagtggaccttttaaagatgtgtgtgcaagggggatcggtagttcctcggcgcattcaggctcagacacttgttatactatgagtttcccaccttgtaacgagtgatgcttttggatttcagatactagaacctctctataagctccttgatttcaaactaattcgttcttctattctatgctctctctccctcaccaattgctcagcatctttctgttgtttctcagcattctcatggccctcgggtatatgcggcaattgtcgcatctccgcatttgaggcgaccccagctttgtggcccgctttgtgccttttcgcttctctcctgctgtttcctgttcgtatgtctttgaatactccggggaactcctaatatacctataattccctcttcagtttgacttgggctgagctctgccatcctcttctcagaatcagctactccacacttttccccgcaatgcgtgtcccgtccccgctcgtcctccaaacctggggttgccgactcggaccacggaaatgtctcaactcattccgccagtcaacaaacattacacgaccagcttatagaacagtagcaagttatacacatcctcaccatgcctcagccctctcagtcctccccacagcagtggacacctcctcacaggagtaccgcgaaaacagcgaacaaatgcaaaaactcctcgaccagatgaacagtctacacacaaaaattgcacgcggaggaaatgacaaagcgcgcgagaagcacatcgcccgcggcaaaatgctcccaagagaccggatctccgccctagtcgacccaggcacctccttcctagagctatccgcactcgcgggacacggtgtctacagcgaggatgttccagcgggcgggatcatcaccggaattgggatggtcgagggtgtcaactgcatgatcgttgctaacgacagcaccgtcaagggcggcacctactaccccgtcacagtgaagaagcacctccgcgcacaggcgattgcgcaggagaaccgcctcccctgtatttacctcgttgactctggtggtgcaaacctgcctcatcaggcagatgtgttcccagaccgcgatcacttcggccggatcttcttcaaccaggcccgcatgagcgccctcggtatcccacagctctccgttgtcatgggtccctgcacggccggtggtgcatacgtgcctgccatgagcgacgagaccatcatcgtcgagaaccagggtactatcttcctagcaggcccgcctctcgtcaaggccgcgacgggcgaggaggtttccgccgaggacctgggtggcggtcagctgcattcgagcatctccggtgttaccgactacctggctgtcgacgatgcccacgctctagtccttgctcgccgctccgtcgcgaacctcaactaccctatcacgcccactccgctccggctggaaaacggcaatggagattcgcatgtcgtgaaagaaccgctatacgaccctaatgagctaaacggaatcgttggcaccaatctccgacgccagatccctgtccacgaggtcatcgcgcggattgtcgatgggagtgaattcgccgagttcaagcgcgactatggctcgaccctggtaacgggctttgcccgcatccacggccaccgtgtcggcatagttgctaataatggaatcttgttctccgagtcctcgctgaagggagcgcactttattgagctttgcgctcagcggcggatcccgcttgtcttcttgcagaatatctccggttttatggtcggcgctgatgccgagaagggcggcatcgcgaagaacggtgctaagcttgtcactgcggtcgcgtgtgccgatgtccccaagttcactgttgtatttgggtccagtgctggtgctggtaattacgggatgtggtatgtttctttctttctccttaggctttctgtagtagttcttctctaactgatattgctctagtggtcgtgcctactcacctcgtcttctctttatgtggcctaatgcgaagatcggcgttatgggctctgaacaactctcggccgttatggaggctgttggacgaaccgctgatccggctttgaaagaccgcatcgaccgtgaatctgaagcgacgttttcctcggctcgtttgtgggatgatggtatcatcccgccgtctgagacgaggaaaatgctggggttgggtctgacagctgcgctcggtggcaaggctgagccggatgtgcagaccaggtttggtgtcttccggatgtagggttggatcgaggcatggtcatttttattcaaataattcgagaaaatatagaatagaagacatctgtttatgtgccgttaacttgttacgacggttccggatagtcaaatggaatatgcggtggacagtcgctttgtatcaaattatgtagccttggcctctatagactatcgttctttagtctagtggacttctagaattgcacggcgcggtccaaagagcgcatcaaaggaaagtgtttgaatcgcacaagatatccggtactataatttcactcctttatgttgacggcgaagggtccaaccacaaggattgtagcgtgagcctatcaaccaaacgataatagcaacaggaccaaaagaaaagaaagcacttttttccatctcttgaaagtagtctttttagagtccagagcaaccaagcctcaatcaaatatgtcaaataataaaaagaagtatgacaccaattgtgtacagcgcaaaaaaaaaaagaaaaaaagaaaagatacaaatctgtagctgcgaagcatggttctataggggtgaggagaggagaggcatagacatatcggcagcatatagaaagaacatcagtcatacatgacatgtcaaaatgcatagcggcgtcgaataggcatagatcgcagagggtcgtatcgcatgaaaatgaaacaagacaaggggcctcggcgccccttgaattgctaaatcaaaggatgacacacggaccgcggcggtttttcggccggcgattgtctcgcttgcggttcgggccttcgcgctttcggttgggatcgttgctgctctttgcggcctcggagtctttgcggatgatctggcggcacagatcaacgaagacttcgttgacgtttgcgcggcgccgggcagaggtctcgtagtatggtgcgttaccccatttctgggatagaccgaaggcgcgagcgcgtggtacagcgcgatcttcttctaggtcggatttgttgcccacgatcacaattgggacgttctcgtcgtctttgattcggatgatttgttcgcggagctcggagagttcgtttagggaggacatgctcgtgatggagaaaacgaggaggaatccttgaccttgtttcatgtagagctctctatagacaatgttgttagtacggtgtgtttttcttggagttggttcgcagattggtgatggatggagtgtggctagatttacctcattgccgcttgtgggttgttagcttcgatctcacatgggtagatgtgccaaaaacttactgaactgttctgttcctgcggtgtcaagacttcgaaattttagcatcatgccatatccaaaccaccgaggtactcacatctccagtatacattgtcgaccctatcgagcatggttaacggccgagtgatttccagcgcgtagtagacaacttacgtccacctcaatctgtttccggtatgaatcctcgatcgtagggtcgtagctttcaatccagacattttgaacgaattgggctagaaggcgattgttgctcagcttgaggactcagggcagggtgcggaacacagggaacgaacctgttagacaactttttccaacacctcctgttatcgcgtcgcatgggaatgcctgtggtcagcctatgacctatggaaacatctcaggaggaaaggctcctaccagcacccaacacaacaatgtggtattcgcgtctaagcgcaaacaaacaattagaattggatctagggacattcaaggagtatcatggagtatcatggactcactgtggccgcattgagaaaagtgtgtatcgatatttagtgattcggaatggaaatcgaaacagctctcgaggacgaaggtcaggctcaaggtggatcccacgtggtatagatggcgatctcaaatcgtagaacagttggctatgagaaattggcccataaaccacgttgaatgcttcaattgtattgtgtagctcccttgggggtggaagagctcaggagggcggtacgcgggtgtggttacatggcccgcctttgcgtagacgggggatatggagattcgagtggttcgagggattggagggtccactggagaaatatcaagacatataaagtaaggtaaaggtatttaggcgtttctgcatgaatttttttaggggaggggagaaggtctgataacgggagttatcctaattgcatctcctgtcccttcgacccaatcacaccatatgccgaggtcgtctctggcggtcaggcgctaactgtaagtgtatgtatgctgtcggtcttttcagaatgtttgctcctttcttttggggtcttcttggtcttttttttatcttttctttcccgattgcaactgctatccctgtgaatatggatcacgtgactcccctgatatgccgtcccagggtcatttgtgtttgaagatactcagaatcggtcatttttctaaattttcagattgatacctcatgtttgagaaaggaagagtgtgtggaaatagggcaatgtttctcaattggtcagttttgataggcgggatctcgggggaagcagaaggatgcatcacatacgaccaactactgcaggggaggcccacaaagggactctccccggtttcatgatggaagaaaaaaagaaagattagaaacgcaaacaggtcaacgggtaaacaagttatttggtatagccctcgatgatcttgggaaaagccgcgtacgtcatgtcgtataggatgtacgatctcgggagatttgtggaggggccaacggactggctctgatacattatactccagatgttcgatttgaaatctgttttaaggtacatcgatacatagggctatcactgctgaagcttaaactcgctacaggccactaatatattccccttagcccctcaattaggcactctagcagacggcatttatgaagatagaagtagtatccatagtcatctgcacgatctccaggtgtagatcttctgatcatatcgatatactccttatatcaagccaatagccttggaacaatttactttgtccagcttcataagtggatggatacgtcatgtctatcacgtgatgagcacaggctagccagcctctgtcctctttgccgccgtcttgaccggttgcattctcaccatccctcactccgttctcatcctattagctttctgacttgttttcccacaaacgatacccttataagcaaaaatggcctctttccaggaacgtgcccagcactctattgctcagctcgacaaggaggtacgtttccagccattgttgtgtgtttcgctgtcctcctaggtcaaaccctcgcctggtggctgcaatgcccctaagcgatagtgaccacagcaggagtatctgcaatcacatcctttgatacatacttcactatagtatctatcgctgtggttttgagctaacatctgctatttcgtagctctccaagtaccctgtccttgccaaccttgagcgtcagaccaatgtccccaaggtctatgttatcctcggccttatcggaatctacttcttccttgtcttctttaacattgctggcgagttcctcgtcaactttgccggtttcctgatccccggttactactcccttaacgcacttttcacctcaagcactcaggatgacacccaggtgagttttttttttgtaaatttccccctttacacacaaattactaaccttgtcttttttcgctcctctagtggctcacggtatgttcacatgattttatcacctggttgttacaatcgtgcggaagtaatcaccgccgattgttatcatacaccacccacgtgacatatttcccgcttgcacgcgatcagtaattctaacatatgacttgatagtattgggttgtgtttgctttcctgactgtcattgagagtgccatcagcgctgcttactggttccgtacgtgcccacaatatgccgattttctgactatcttgctaactgatcgcagccttctactacatcttcaagttcgttctgatcatgtggatggcccttccccagaccaggtatgttactattccatgaccaagttaagaccagtagctgatctcttttaagcggtgcccaaattgtcttcaactccttcctccagcccgtgcttggccgtttcttcagctccaacggcacttcctccaacctgcgcgctcaggccgaggctgcgagcaagccccactccacttaaaggtgtgtagtctcacatcttaaccgagaatcgcgtcgacaataaaagctccgcggaacctgcttaggcgcaggttgcggatccgattctctgtgcccaagcacaaagtggagtggttggctcaaatgttcgttgtcatgattaaataggggtagtgcaatagctggaacatgaaatagagaggacccgagcaatgttgcaacgggtccgaggttggatattcgctcaatgtgagaatgctatattggttcttgccattttgtcacactcgagtggattagttgttagttcgtacattatgaatgtggatgcagttggtttcatagatgtgttcgagatcgacgttatctacattatctacatgtatcttctcagtgttgccctacgcgccatcgagctgtgtccttacaaagccgtacgagtgaggatgcttgagtatccatggatagatcgaaggcttggagaagaccgtacataactttgtcagtagttgccatccaaaatatacatcttgactccaagaactcaactgatacacacatgtcatgcattagtattatctgcgcactctatcatctaatgacctccttaaaacgtcgtgcacaaccgtccccgcaaatacagggtgaacggatcaaccccaagaagctggtccgatagctgctagtaaatatcaacatcccaatcaaagcaagtgaacttaacaatgacaatttcttcacattgggaatgattgattttgtaaacgcccgttcgaagtcttgtactcttccccgggtcaatatactcaatcaaagcagtttgttatgtattctcaatactcgagccgtcatatctgcttctgttggatcaatgtgatgcttctttggtttgcattggggtattggcacactgcatgaaggggtagttgtatttggggctaaatatcgggtgttgatggatcagatggaatattattggctaagagatagcactttgcttacaatctgcaggcttttatgcaggatgcagctccacagaatgtgttttagaaaatattacttcaaaccaaataccatgacggtctcgttgaagacacgttgtacaccgagatcacaaacctctctggtttatgatgtctcgtgaggactcaacagaaggcctggaataggggtttcatattgatttgaaaaaggatccatatgtactttacgccgcattgtaaaaagaaccagcccagccctttcaagaatccaaaaatacataaacacctaagcactgaactccagatgaccaccacagcacagggggtttgtacactcatagtaataaccctttttataacatctgacagatttcgtaactcgtatcggggtcgatcgcccgcagccatgtttcaccgaaggaaacaaaagcaacgtgtccggttggttgaacaatgatcggagcgggaacgtattagaattgacgatttagaggtatctcgtccaagctcttagttaaacagcatatctcagtaaagccccatgcgatttccccagccatcagcccgcgggttgacgacaatccgatagggaaagggattggaatcgctagtggtgatgggcgggatatggtctttatctcgattgacaacgctcaggattttcaaagctgccttttgcagcatatttcccattgccttgcgcaccttggctcgttctgtaaccaaattagctctggataaaaaagggaccccgcagactgtacataccagactcagtacgcggtgtcgcgatcgtcacatcaagtgtccagatctcccagcacacctcttcctcgcctttccctgtcagtccaccaaaccagtgccccgaccgacgtcgtttcttctcgtagaactcgactgcgatccgccctcgcacacccccgcccccaccgacaatttggccatcctgcccgccggctgcggaggacagatgctgccggaccagagctgatatccgtgattcaatcagtgtttccaggtctgcatcgtttatagcggggagtgtgaagtcgagcacgtcaaaggtgactggacggatagaagggaaataacggtggaagaagatgaggttcaggacgcctagcaggaaaaacttagcacaaacgacatgattaatatgtctccctcacaactgacccttcagtacatctcgcacatgggtggtgtccgcgaagatctccagaaagtactccggaggggttttgcggggctccatccccgccatgacgcagctcacaaccaggccggttgagtgcagcctcaaacggttcctgctggtgaaagaggaagtattgtcaggaatacaaaatcgagggacagtcagtaaaaaagttgttgcatagagctggaggggtgtaaggtggagtgatgattccgaggccgatatggcaaggggggcgggtctgtatcggacgtagccgactgaagcttatcgcttatcatcgaactggggtgaaaccagcttcaaagaggacatctatgttcaaggagtacgaagtatacggagtagaagtataaagagcaatgagaagaggacaagaaagagacatacagggcttagcgggttattgcgggatggccatgccaaatccggagctctaagatacgatcattgatgatttagagaaatgagtgaagatggtcaaaagtttaaagctgtaagctattgcaggtattaaaatcctctgtggtgctttatagacgcggttcacttacattgcatgacggtgagctctagccgaggcctgaaactggcgatcagcgcccgaagccgctcttccccatctactccgtacttaaccatccatctcccaaatatatcatgacttgggatcgcctgtcattttaacttcttccagagaagcaccaaacacaaatatgatcggtgcgacgaggcgctggttccagcgcaatcgcaaaggtcttgcaatcggggctggggtgataggagctggctatttggccggacaatacctgctgtctaagatctccgaggcgcgggaacgcatgagcagcgatcggattgctcgcgagaagtcagttttccttgtttttgatgactcctattcctccgctagcaagcacgcgagcttgtagcacgtgaaagcccgaccagcataccccggaccggaatcactgacccatggcaatagtttgcgccgacgattcgaacaaaaccagaccgattgcacatataccgtcctcgcgttattgccgaccgccgccgagaatattatcgatgccctcccagttgaggagttgaccaaggaactccagcagaagcgagcggagaggttggctcggctgaatgcaggagaggcggctgggtcagatctgagctcggtttccccgagtctgccggacgaggatcggaggagcctctctagtttccagagtgaaggatatgtgcacgcaagccaggccggcgatgctctgaactcggacgcacaacctcggcccaaacgaaacaagacacagctgtggaatgaggtgaagattacctgtgagtctgtttcgttcatcataaaacctcatctgtcagaaattaacgtttcttagctatcacgcggtcttttactatgatctacactctctccctgctcactgtcttcactcacatccaactcaacctactcggccgccggaactacctgtccagcgtgatctcccttgctacaccacctgcgaacgtctcgacaatcagtcttgaagaccacgatgatgaactcactcagacattgggcgatgacttcgagaccaaccggcgttacctcgccttcagttggtggctgcttcaccgcgggtggaagggtataatgggaagagtgcaaactgccgtagaggaagtatttggacctttgaatccacgcgaggatatcagtttggccaagctctctgagttgaccttacaaatccgcaagaaggtggaaggcagcactgaggacgagcgacgatctcaaaaatggctttcttgcttgcttcccccggcagaggaagaggaacatgtcttgcgcgagtcgggcgtggaaggcgtagccgacccaacctcttcccagacggcatcgaagctgcgacacctcctggatgagacggcggatttgatcgactctccctctttctcccttgtcctcacacttcttaataacgagggattctcaactcttatcgatcaaagatgtgccgctgacgccttcaaggcgcccacctctgcaccggagactgccccgcagtccttcgattcaattgccactgttgtgcccctggctgccaactcagagcgcaagacaaagcttgccaatcttctggctgtcatgactcgccaagcacatgtgattggcaatggtgcccactcaccaaatgagtatctggtcgccatggaccagaacgtgcgtgagctcgaagccttctctgccgtggtctatagttcgaacttcgacctcgagcttcttggtgccaataatacagcggtaccgactagggagacagatcttgtcgatgccgaaagtgcttcatcgtctttctccgagatgatagttgagaaagaagacaaagcagatttaaaggaggatataaatgagtcacaatcacgcaatgccttgcccgaggagccagccttcaacgagcctgcgcctgagccgttggcagactcagcctttgaagaggcttggggcaaggccacagatgatgggagcatcttcccagcaggaggaaacagtaatacgatgaagataaattcaatcctgatggcgattgtgtgattctctacaaccttactcccttgtttttcgcacatcgctgtgggtctggttttcatctccactgcatacattatctttgcgatagaattgtgttatgttaatgatatatgtcagttcaagtatctattcctagttagttctctcgaaaattcctactagcgcaatatagctgtgcatgttttctctacgttgattatcgaggtcctgaaccctacggtttagcgagcatgccattgtacaatcctataccccagatcaaagtggactagtgtgagtggagcggcggggggcttatgcttggggatagtggcgctgagacacccaaggcgaagtcttaaagagattatggagccatattaggtatctgcaaataacaagcttggaaagcaaaggatatgccagacatatgcgccaatcccgctagcctcgggactgcaaattgtgacatgcagatgtttttgcgtctacttagtataacagacatagttcatactacatactatgtcctatatcgcacctttttttccccactgtcacaatagtctctgtcctcgaccggtgccttgttctgaatgccaatgtacgatcaggcacaggtacttctcctttgtgtctctgtacaaacctggatacgctgaaacatcttgacgtcatgactatatattttcctttcgcagcttccgagctccaccaatgagctaatcaagcccacttcgtgtggcgcagctgtcttttatgtcgcgcaattgaaattttatcgtatttgactatacgggagatggactacacatgtattgaggtagtacgtttagggcctgattttcgccctattaaatataaggggttgaagcattgccttaactatgccctttctttcaagggatagtccaattatgcattaatacagccctgggagaatcaacccgtagctaacaagtactctggatggcggctatttggagttatttccctgtacgtggtactccgtaaaaattcccctaacgacgttttctcgcaaggaggtataccccgcagtgcgcacaggtgcaacatgcaccgtgcaagtatcagccataataggggccggggccgatgacagcgggctgatcattgggctgtatcgacctaaggggcttagatgatgcattagaagccaacacatcccataataaaggatattgtccctgaatttaggagtatatacggggcacggaatagcttatgcttatatgcaattaaatatccaggcaagcattatttgagcaatatagcacacgcggcagtccccactcatatggtcgttctgcctatcaaaaagggcttgatcttcgatattccctcacaagagagggctaggtctagtagcagatactcgaagttctgaaacgctggccagaattcaatcgtctctactagggacgacacgtgggccaagtacatctccatatcggttggtgaatccagcaagatggatgacacagtgggccatctagttcgatctgatcggcactaacattatgaaccagcatcatgtacttatcgcttgcacgagtggcagcagataagcacaacttgaagtctctcggggtccccgacactagctgccatgctgtcatttccaatttcccgcctaaactgagactataggacacagggcgcctgtaacggacatagcaggatatctgactgcagtctctgggacataggagaagacaagggcagtgtaaactggcattgtcgatagggtacttgttgcttcggagttaccggcggctggatggtggagccggctgatggctgtagcccctgttatgtatggtgtacgttgactgggaatctagaggcccatgactcgtaccatcatactaagcattttcgagaagactcgttagttagttatcctcagtgggaataaccaaggatcctgcgaatatgatgtcgctttcaagtgttcacatgctcaggggtaaatttgtagggatggcatgtcaacgtagcatttatccatgaggaaaagcctgttgtgaaagaaagacatttgacatgaagagctggagagagacaacaatttgaaacatcttgaactgtaaccatataccgtaaagtacccagcctcaggtgtggctgagctaagtactccacccgcaaaattgggtgggaaggtacttccaaggttcctccgccgtgttccgtatcgtccaatcaccttgctcgaccaaggaacggccggtcagagtcctcaaggattcccccgatgtgccctgtctctccttaagacctgcccatcccaaccattcctctgcattcgacatttattggcagactccagcactgatttgtgcttcttcgtaattcttcactatcactgcagtcaccgagatcgcaccgagatcacctcacgattgagttcaggactttgtgtcgtcaccctcgcctcaaaattaccccgaggatcaacccattgcacatctacaacgccttggtgccattacatatcgaaggcctttactctcagtcttccgcttaagacctcccaaaggggattgtggcggctgcatactgcagtgggcgctggggccgcattatctccctatccgccagccgcgcgcatcggaaacgcagcgtttcaagtcatcgtcacgaaccatcccacatcctgaagtaacagccagtgcacgtgcactcacgaccaaaccgaactcctaggacagcgacctcgcacattgggatattaaggccggtgtactatcccgcccaacatgactgactttcgaatgcccctccatcaagggcctcctactcggaagcccctctctggtgcccagcacgcgtatggtggatatcagtcctacgattctccccgacctcaacttgcgccccatctagcgagcccgcagaccacgcacagtcggactcgaaccacatcctccaacgtgttgccctactcaagcggctctcagcattaccacggcactccctcacctcctatgtctcaaatgactcttcctcaccatccaccatctcgccgcatgtctagcaccactacctcgacctcgtctaccagcaaccacccggtacacacgggaaacagtgtttctgacatccgacgaactgcttcggctcgctctgccaactctcagcttggatatgtggcccttatgcggcggcaaaaagctaccgtatggtgtgaccgggcacaacctgaagacgctagattgcgcgaacaagccctgcgggataagaaacgagcatacctcgaagttcatggctcaggcgctggccggtcaggaaccttggctagtggcaagattcgacatggtcctaagggagctgctgaattttcaccctcaaacctagtgggcgccaaagtccccgtgcgactcagcgcgaacgagatcggtgatggggacgatgacactctcagcagcgagggtggcgcaattcacagacggaccggtagcggccgcagctctctgggaagtgcccaccgctacccaagtggatactcgcggacaccgggaacaatgggcagcaacagcacgcctccgaacgaaaggacggaccttccagaagtatccgaaaatacaccggcggagattcacgaggaagaaaagagccgactgtcatacctccacaaagacgatgccgccacaacacacagcagcgagcaagagcaagaagactttgttggcgacatgttgggtccgaatgccggcactgcggcagccgataaagccctcaaagcatccgagttacgacgacgaggcagtgtagacgagcgaactacttccatgaccaatgtgcgacttttcgtcgcaaaccccgattcagacagcgactgatgccctcgttctcatacggcgtctgccaactcttgtatccttcatctccttcccatatcgccccgccttctatcttttatgattttcacgtggtttctctttatgcctcgtcaactgcacataatacctatttcgttgcaactccacaccgaccccatttggcaaatcttgatggtttagaccaatgcgtccttctgctttgtccatatctttgcacgtttgctgtctgatttactccttttcatttaaagcgccacatctctgtttctctctaggcttccctctttcttgtcttgttgtatatcctcgatcgcactgctggtctccatagattggcttcctggcttgtcttcatccttctccggctgcatacgggccgtcctggcgttcgtcatatggcctagcttctcttaatttagaggtagtacctaattttcaaaccaaagatcatctcaatccgtcttgcatttgggataacttgtgtggagtggtatgggcttttgttgtagcttcttgcataggatagagcgaggtaattaaaccacgacagtaacagaaggacatacgcaacttgaaaatattgaaaatattgaaaaacacacaacaccatactcattccatattgaccttgggagtccacaatgatgccataaattgtacagcatactgaaaacccccacataaaacggcgcccatcgggcacttgggcactcggccctgccccagccctggaggtgggcacatatattggttacataagcacacacgtgcttatcggtcgcgagcgcgaaacgattaacgcgtcccagtgttggcccatctactccgtactccatatgttcatcaagcagcgaagtcgatattctgagattgaagaccaattgtcttttgtctgtcccttcaagtcgcgctttcccctgattggcacgacctaaaccactcatgaactgaagtcgcgatctatcacacgacagtctgtccccatcgccccttcctcacctacctacgctcctgagacttcggattcctacataaccaactctttccatctattctcgtatcaatggtacccaagacatctctatcgccgatgcagtcggtccggtcctttcccgcaccaccttcaccttcatccggtccccgaaaacgctcaattcacgaggttgatgatgccgatataccctcgccaaatgcgaagcgaccattgactgatttcgacggcggaaatcaagaaaatcgcgatccatctcttgcctcccagcctgccaacactacttccccgcaagttcagatcaagcgtaatcttccacctcccccctcggtcgaaatcgtgatgagaaggaccgtacataaacaaaatgaagatggtgctggggaatcaacatccccaggcaccaatactgcttctaatcctgagcttggtacgccggcctctaagaaacgcaaggtagtatctgctggcacagattccaagcaacaagaaaaggaagccaaagagcgccagaaggccgaggagaaggcgaaaagagaggaagagaaggcgaagaaagaagaggagaaagccaagagagaagaagagaggcgcctgaaggcagaggagaaaaagaagcgcgacgctgagcgtgatgaagagaaacgacacagagaggaagaaaagcgcaagaaagatgcccaacgtgaagaagagcgcaagcagcgcgacgaaaagaagaaagcaaaagaagatgaaagggctgccagggaagcagagaaacgtaaaaaggacgaggagaaggagaagaagacccgagtaagtggcattgacaattgatttagcagcaagcttcccatatactaaccaatcagtcacaaatgaaactgaactctttcttcaccaaaccatcggtaccttcggcctcatcaggacttgtattcacggctccttcgcctaagaaggcatctactcccgtcgattcctcttgcgaaactcgtggcgcgcagtctgactatgagcgagagtttcctgccttctttttacaatcgcatacagttgtggcaccccctcatcggttcgagcgtgacaccgaagccctcaatcacgtacacgaaacgatcgattcatgtctacgcaacgaaatccacacccaaacacatccattccgtcccacggaagtcttccagataattcctttccgtcgcgggcgtcagccaacgacctctgtcagagacatactattacagctacaaaggtctgacgaaactcagcctactcaaaatcagagcataatgccaactccgaggccacaagaacttctacgtaaggtcacgatgaagtctctcaagtttggcgaggacatccgccctccctatcaaggaacttatacccgtcgcgtgtccgagttatccgcgagaagacttgcgcgaaatccttatcatcgagggctgccggatactgattatgattatgattccgaggcggaatgggaagaacccgaagaaggtgaagagctggactctgaagaagaagatgaaggcagtgaagagggcgaagatgatctcgaaggcttcctagatgacgaggatgatgcccttgccgagggcaaacgtcgtcttattgttggtgatctagagcctgtctctactggaatcaagtgggcggccaatggagtcgagcctgaaatggaggcctatcggatagagactatatccgatggggtcaagttccccatcgaccccttctcgactgcatattgggaaagagcaaagcccgtggatcaagtacttgggaaagcgcgacccgcgacagccctagacggcttccttgttcctgcagtcccaggggcagtggcgacgggcagtgctttacctcccacatcgaaagcgaaacggccattcccgccagaccaacttgcagagttcaaggaagctgttgaaggcagcgatctcagtaagattgggttggtcgagattttgaagaaacggttagtcctatcatctccgctaagttccgcttctattagagcatatactgatccaggtgtatctagattccctaaggtgtccaaagatacacttaaagctaccctggaccaggttgctgctcgtgtcggacaaaaagaagtggacaagaaatgggtttgtcggtgagagtatgctgaattacctacacgagtacctacgaacggagtttggatgtacctaagcatttgtaatgtcaccatgaacgattcacctatcatgatccaacagttttgctttttttatttattttaggagtcggggtatcccgggttagctgcatgaaatcaatgccggttgtgcgtgtcgtaggacgatgtatataagccaggatgatacccttgcatgtgcgcatgttgccactctatgacatctcgtatttctcgccttttaggcctcagtgggtgatttaataggctctccgatccctatttagtatgtcgcacatatgtgtaaaataggcctttaggatacgtaagagcagaaagtacacgtctataaaatccgaggggcgcatgaggggcgcatggacacctcattccctgcactgccaacgcatcgtctcgttgtactcggtacctggccctttaaccctgctagcgtcgttcttataagtcgtttctacttggcttttggcacttttgtagtctgcaactgtccgttccgaggattccttttttctattcagaatcccggccttttttttctggttttatactccgggtttccattagttacctatttttacttggatttgaaaacaaacccttcttccctccttatttttttcccttttcctcttcccccgccttttcttcccacacagtcatcctggaaaccacctgttccgccgatcgagtgcagtgtcactctgagcacctgagtttcatttcagaatgcgatagggatccgtcggctagggggggtttgcgactgtctgtcgctaatggcaagatggtagaacaccaagaggatcattcgtcctctttgcattctacaaccagtacgtcattatgtttttgcgcattttctcccttatatggggctgggacgctgaaagaggggcgctcctatctttatacccccttattgtgattgcagcccaatctgaccagctccagccgagcaaatacctactttccccaaggttaatacaccatgtcccttgtcgtatcgggcgcaagatcccgcatctgtgcctttacctccttcacctccgggatcgccagtcatgtcgcccacattcgtcaaatctccgttgaacgtggggccaggtgagttgggtggctcgggccgtgccagtgccacggtagtggccgctccttccaatggacacaatcccatacccgcgatggcttctatcatacctgtacccgtggaagatgtccctcagatctcattcgaagattttgccactcgctaccaccagaaccagcgcaagcaggcccaaaggaagcgactggagaagcgcctgcgtgccaccaaagtgtccattggcgtctctgcgcgtatggttcgtgtcgggctgactgcacagcgaggtctcgtcgaagccctccgccatgatgacaaggccagtttcgttgctctctaccatacactccaagacctccaggaatcatgctctgcaccggctcccaacgatggccagaccgaagactccatggacggggagccatccttgggaactgacattggccgtttcccggatttccttcatcagctgagccctcagtctcggacggacttcctggaaattttgcggctggtccgctctgatccccagtttttggtcgaccggttgcaaagcctgtcgtcgtcccaattggctgcttttacttctcctgccactgctttggataccaatgatcctgcgtttccttccacctcccgggcccgggcccagtctttcttgaataagagccagactcagtccactgccttcaaggaccacgcttatgcctttgagaggactgacccattatctgtacttctttttaacgtttttgccgctcccttggacccagggacgtctgaagcccgcttgcgtatggaagtgtggtcgtccgtctgcgctcaactaatgtccaacggaagtagtagatactatcctctgatcggccagatcctttcttcctggaccaccgacagcacttggaaagcccgctccaagtttgaactctacctgatggacattttacaaaccggtgcttttctcctagagcccatagccactccacccggactggattttgccatggattccctggaccccatgcgcacggatgttgcagaggaattctttgcttccgctgtggatggcttgttctctgtacttgatgacccggacggcggctttcctcacgccgtgctgcagtttgcaagagccgttttgcggaagctgaataaccccgagacccgcaggcgcttcctggagtttttgtttctccaatggttcttttccaagttcctctatcgcgcattgacctatcctgaggtatataagcctctagcccttggtgaacttgcgaaactgactccaatttgttattgctttgatagacccacggtcttctcttagatttccatatcagaaaggatgcccgcgagaaattgctgaaccaggttggacaccgtgcctacgctcaagtctttgctgttatgcgttcaatgtacgtcacctgaatcctctgccgatgcgacactgttgctaatatattcaaggaatcatttctcaccccctcgtccgataatcaaggacagtatcgagaacatgctctctcgattccatgacgcgatgccatcaaaggtctcgattgatccttctattcgctcttcacaggcaccacttcgacgaaagtcttcttcaactttcttgatgatgtctgctttagatgtcctcacactcctagacactctcttccaacagacgccttcttctttgcattcctccccggcatctgcaggagttaattcttggccatccagtccaccatctttcaatcttcggccagactcacttacagattctggattcgctcgtttcaagcacgacacaagttcaaaacatacatccaatatcggttctatattctctatggagactcattctctcttcccaccggaaaatagcctgtctgaaaaggccgctcgcattcgattcgaactaaccgacttagaccatcccaatgagcggttgagcttggagcatccctccgatgagcattggactatcttctcagttgcagcagacggccatggcttaacatggagccttctccctgatagtagatatgaaacgtccaagggcccgattatcgaaagtgaagatgatacccagtccacgacgctaggactggaggaaaatcacgaagcactacagaccgcgatccttcgacttgtccaagaaaaccgcattcaagatgtgggcgactatgaattcgtttcacggaatactacgcagccggccgccatgtccttgaagcagcggttcaacgaagcgatgttctgctgccatcatgactctgattttgttggcgcacactactggtggaatgcttcacagcagcttgggcaacggggaatacctagctcatcgaggtcgacagacgattcatggatcttgggcccgatgcatgagaattatagtcgctcgctgatccaatcacgagctgtcattgagcgttgcgagagtgactttgtgtctctcgatcacagtctctgccgactccagactcaagtcaaagacctgacggccaccttttgcaagatccgagacaagatgtggtacatgagcgacgtcaagaactccatcagatatgaggaggctaaacacgtggctatggctttgaaagcgatgatctactcagcccgtctcttcaaccagtaccccgaagaacagcgttctcgttacggaacacgttctttgggtggctctttgttccagaaacccgaagtacaagttatgaacatgatgaaggcacccagtagccagggtggaccgaataagctgtctgacgagcaagtcgagctgacccagaaatggttatcgcacaacggcatcgacaatttctgcaagggagaagaaagaattcatcgattctgctacgaggtccgaatgagcatcaataaactagtgggtgaaacgatgaccgagacaccggtgttatgggcaagtgaacttttccagacggaacgctcgaaatatgaaggttactctcgcacattcccaggaatgtccatgccgagcactcctcggccctcaacgaccacaagcgaggacacaaactctgcttcccacttctacggtgccaatatacctctgctcgatcctacgtctcgtctttctccggatattccgtcattgggtcacaagccctctttccaaagcattatttccgataaatggaggcctcagcgcgatttgccttcagttgacatgtcttctctcggaggctcaccaggccgtgctgcttcgacatctaccggtgacacctacagtacattctggtctgcacctcagaagcaccctatgtatgccgcaagcgcgtcgagcgtgtactcgcggccaccatctatgttcagtgagacggcaacccgtcagccccgtcgtgtcgaacgcaaaccgcatgggaagacggtgttcatggatgacttgagacagacactaactagtctcctcttgagcgatctgggctctccggtatggagctgcggtagtgagactgacgcctggttcaccaatgcgctgaaccagaaacgcattcaggtggaaatgcgccgacgagctgctgtccagaaattctacgtcgattatgacgagcgctctcagcatcttggtcagcaacgtggttcactgaaaggtcgccggagcaggtctatgggtaaccttcgtgaatcccaacacaaagctcctcgtgtggagccctcgtcgcagctaccgcagacatttatggaatcggacggacagtcggcattttcatacaaggcggtcttccgccggctgattgaagtgttctcgcgtcatggaaatccctttgtgaagctcaacgcgttgcgggacttgcgttccttggtggttgcgtcgctcatttcgccccaagatgccaattgccctactgatatcaactcttccccgggcgaaggtgagaggatgaggagcagtccgcaacttcatcgggccactcgccacagtttctcagaggtgcggcccaacaacctaccacagatggacccattgcttccttcctctcctcccgagtctgtcacatgtggctcccgacggtctgactactctactccgtccgaagcacaaattgtagcagctttgcgggatctcatcctagaaatgaagccgaagacccttttcagggacctacagtttatctccgcgttcgtcccaggagatcagctaaacaagacggattgcgggacagcattcctccaattcggtctggccgcactgagcctcaaagaagagatctgccacagcatggttgaaatcgccgaccgaatcgtcttccaagagctctcccgtcgtcatacccctttcgcctccgacttccaatcccgccctggccatgctatccaagacgcagcgggaatgtggatcatcactgccaaagaaggcaacccagtcgcacaacgcgaacttgcaatcctttatctgacccacccggagcttctcccacgcgtaacactccctctgaccctcccccgagataccttcaaggcggagatgatgtatcgacgggacaaagactctaaatcggatccgcagagtatgtgtctggcgctgcactggatgcagctgtcggccagtggtggtgatactcttgctcggaaccgacttcgtgagcgtgaggagtttgactcaatcgcatgagaggctttctggcctgtcttttctcgttttgttgtgtcttttttcttctctcattctttctcttcgctggttcgattttatttttccccttttctctctcactctctctttgactttctttcctttcttatctttacatcgcgtcgatgcatatatatccatatacccctgttcgggcgatctagttgggtttttttaacattcgtggactttgagactcttgcctcggatttccgtctgcgcttggctctggaacatgactggcgttcttcaatacatcggaagactaggcggtttgctgtcttaatctcagtttaatgttatatttcctttcctgtctatttaccagtaatgttcgtatcctttcatgctagcttttgaagatcaggacgaaagcgtcactgacagtttggccagttttcaaggctgtcgtatagcattaaggaggaggttgcctggacaacctcacaatatcatgttcaacctcccatagttatctcccatctaaacgttagctaagctggatgcatcgggtagatgatcgggccgacgtcatcgagtggatttgcacccccaccaacttgaccttatacatcttcttcttctttcctttgctactcgtgactagtgactactgtgagctgactcttatctatctgagtcaggctcatttgattcatccgtttttccccgtatcagatcaggcggtgctcagcctcttttttttcccgcacggattgcaaaatttgaagcctgtgatataatcaaaataaaacaggccacatccttttgattcccctattccccacccctggaaatcagtcttcttattacctcgtccacttgcaaatcgggcgacactcggtctttcctaactaccatcccaccatgactaccgcaccacacatgccgggcaaggcgcacagctccgatgatgtgcaccagcggccaagaggtaagtccaaactacatcagcaccagatggtgaccgacagcaacgagaggatctgaccggtgcattcttgcgccaactcaacaggcatcctcaagaactccaacccattccaaaccgcctccgctccgatggcacccaccgctccaccctcggttctaaccatatctgagcccgaggagaccaaggacatcaccatcctcaacaccctgcagaacgcaggccggcgatcctcgtccacccgcccagggtctcagtcgcgccgacagtcatcagccagcgcccatgacgacaccgagccccgcctaaagtgggatgaagcgaacctgtacctcaccgagcaggagaagacagcgaagatgaagatcgacgaaccgaagactccttacgccccccactacgaccccagcgaagacgaggagcagatgcgcctcgacgatgcaaagcaacgcctcatcgatgcgcagggcctcctcgtcgacgagctggacaagtcgaccaaaccccggaaagctgtggcagaagatgaaatccccgacctggagctcggtgagcccgaggaaaacctagaggatattgctatgaacgatgacgctcgtgtcttccgtgaccgtagcatgagtatggactcgcacaagagcgagaagcatgttcaggtcggcggggaagatgcaaatggcgccgaggcgcctgagcatgatccgctcttgacgactgaagaggcccgcgcacggcacgctcatttcgagcagcagcggaggaggcactatgagatgaggaatatcaaggagctacttgcgtatgttgatcccggtgctgcactgatatctcgattttgaaagctgacttgagacatctagccatcccgaggatttggacgaggaaatggaagacaacgacggatcggagactggttccccgtcgtctatgcctcaaattcctgaacggttccgtaccaacggaaaatagagatggcgcccccttgtttttttcctgatctttccatgtgctttcgtatatttgggtctagcttttctcctacagcggggtggccttaggtgatttcagattgccctcgcgctagtctctccagtttttttttgaattctgtgttctgtttttctgtgtatattcccccagtgttatcgccctttgccgggatctttattcttgctcgcgtttagtctgggtttccacttcgcaaactatctcttcgctctagaccgaggtatatccatttgtggccctttgatccaggtaaatgaatacatgatttgccttgccgagacagatatagcatttaaacatcatagcatcgtcgcttcttgtctaattaagctctgatgatctggagatcgtccctgggcttgtcctacatggatataaaggcgaaaacaagtatatttgtgttactagacaccctatggtctttataatactaccaaccaacacctgtaatttaagaatggcccacatcatgatcgacattcagctgagattctacagccactgggcatcaatgcgcgtcgaagacaggttcacattggtcggaataaggaaaagcaatcataacattcgatctgcagccaggggatgaaaatacggagagctggtatctcattagtcccttgaatttaggaaaatataggcgatgtgcctcccaagccatctacttttggtccatgtatatatttcgcatgaacctcttcgctcagtcctaattttttcatctcctgctttgttttcttgataaatcaatccagaatagcgataaaccaggccttgaaaaatgcatcctttaccggtccctaagaaacatgtttcatggcaaacatggggatatcactggcgctcgtccgatacgtttattctcagcagcatgtccatggcactgttcacaggttcgtgccttgaacgattacatcgaagacgttggatcgtatcttatgactgaaattgcttctttagatgagatgctcttcgccttcatggtcccattactcccttacatcttcgagaaccgcttagagctagacacgtccctcacccagcgattgacctccctatttctagttgaaggagcgttaatatctatcatctcgagtccgtttgtcgggaatatagccgaccgggccagctccaagaaggtcctactactggtgttgctggtactgacgctgatcagcgtattatgtctatcgatcaccacatcatgtaagttttttgttagaatcgcactatcaccctattgctaaatgagcccagtgacctggcttttgatcggtcgcttcttccaatgcattgtcagcaacgcattattcatcgtcggcatggccacaatgaccgagaacatcggatcagaacatatgggcaagatagcaggcttgagcacgaccatagtagcagccggtacatgttccggtcccgtcattgccgggtttctcttcggaatcggaggatactggacagcgtgggcgggcgcggctctgttcctcgtcgtggatatcattatgcgtctgctcatgattgaaaaaccacagaaacgccgcgagaccgcttgtcaagatcgaaatagcagcgaatccctatgcgccgaggagcagacaccctcgtcggaaacagaaccgcttctcgatgcgggtcagtcgtcgagtacagaggaaattggcggttggagcttctacgtctgtcttttccgtcagcgtcgctttacggcgggggttacttgctattttgtctttgcgttgtttatcgcctgctttgagtcgacgattgccatgcatgtccggtatgcttttggctggggcgttttcccggtcgggcttttgttcgcgtctatacaaggaccggggatggtcttggctcctcttgttgggtacttgaaagaccgtgtgggatcgagggtgcctactactattgggtttctctctgttgcgcctttcctgtggtttcttggagtcgctggtgatgagcgctttccgtgggctacgttgggaacaaggggtaagattatttatgccgtctgtacgactatgattgggtgctttatgtgcttgcttatgggtgttgggacgatggaagctactggtaagttggggtgtcatttctagagactggaatgctgatttgttctttgcagcaaccgtcgatgagttggaggatttacatcctggcgtattcggtccctacggagggtactctcgtgccatttcaatcacgaacatgagttggatgtccggtctactagtcggacccatcttggctgggtttatggtcgaaagatttgggtattttgagctgcagtgtgtacttggtaagtgatgtgtgtcggcggcttgcttcccattctaacaatatatagtggttatttccttgctggctagcgccaacgctgccttttacctccgtccaaccagtccccggaaaggagagtgtaatactagtgaatttgggaccgacgaagaactctaattgctagacgtctaagagaatagaatttatggcaataatgttgattcggcttgtcagcttgtgtgggggacgcggtcaatgtgtgtaagaacacagctgtcaaaaatatgcatcagagacaacttgtaataattgaacacgacattatcatcgttggcatctgcaccttgccaatcccttacctgctttgccaatgtgcttgcgcgtatgtaggttgagagtttcggtcacatctgcatgtgtccgtttccgaatgtggcttggctgaagctgactgtatttggctttatcctttgtacggagttaatctgcgtggtaatttagtttaagtgtaatattcaattagcatcttctaatgcaatcttgttaggaggttacacgcagagatgttagatgcatggtgcaatgtgaggttagtattttattaaacggtcgaagaagctgaatattaactactactagagactatttatgaggtctgacagatattttgaatattatattctattgttacctattgagaaacactgctttcacatttctaaccactgtataagaagccattccatatcagccagggtgattgttggctggcgcaatggttcgagacctctagtacctactagggaaaccccacaattccaagagatccccccttaagctccttgaacattcctaggatcggccttccgaaaaattgacaaggtgtgatctcgaggttgtgggcgacctccacgttaggatgatcttccatcttactttggtgatcacctacatcactaacccaacaataaagcaataatcccgagggtatcaaaggcctagatgcctcgggtaacagagtacggagtatatatcaggggttacacctggtcaatgctccggggtgtcttaaccctacggagaggtcaggtgcaacctcggtgatcgtggcgatcaagggagaagaatggtagcagggtatgcagctaccagctctattaattctggctatttgcactgaacttgatggtaaatacattgcatgatgcaggacttagataactatctgcttctcaataagtagctctttaaatctgggcaagattgccttcatatcgtacatgttctcaaacttccctcatagacggtggatgctaaatgtctaattattcttatccctctggttacaatatcaataagagaaaaactatctttaggaagggcctatgagattcacataatttccatccgatatatagaaaccgcttcggacaatggctcagatatccggcatatgtatatcgacatattttcaaagttatagaggctcggatcttgatagttgtccactcagaatgtacccatgaaatgtgctgcgcatataatactatcttatatacctaggcatttgcggtaaatcctaaagaaccatttggctggtagaaacacatatactagtataacgtaccagggtccttaggatacatgaaacatatattaatgctataacaattattgaagctattgaaagttgcgacctgtgcaagatatctaaaattagaagtgtgagtgtgtactccgtagagattaacccaaccaagtgcaacattgatattcccacgtttaaaaaaatgttaacaaacagaaacataggaaatgtacggagtagaaaaacaaaaatagattcaaggtggatgtgatacgtcgatcatgaaacaacataataactgacaggtggtggggattgattagtggcctgattattgacaaggcaactgcaccccctgcggaatcaaaaccccctatttcttttaacctcaacacaccctcaatttcaatcctatcaatcatgccggacaccgctgatcagaatgcgcccgttgcgcctgttgcgcccgttgcgaccgctgtgcctgaagaagccgtcaataagcccgtggaaactcccgcgactgctgccgaaaacaccgaacagactgtagccaaagatggaactgccagtgctccagtcaaggaggaagtcgctgcaaatgatgcgactgtcgctgccactggcactgcagagcccgaagccgcaaagcctgaagaacccaaggttgagcaaccagcctacctgagcaagaacccggccttgggtgaattgttcaatcgcctgccaaccatcctcgaaagcaccggccacactgagatgtggggagtagaactcaaggatagcaatgatgtccccaccgtcaacgtgttgatcaagttcctgcgcgcaaacgaaggcaatgccaaagctgctgagacccagctcagcaaggcactcaagtggcgcaaggaggtgaacccgctggcattagcggagtccgcgaaatacagcgcgaccaagttcggcggtttgggatacctgactacctacgaggagaacggacggcccttggtgtttacttggaatatctacggcgctgtgaaggatatcagtgcgacattctcggataccgatgagtaagaacccatcatggaacgccatttacaattgcaatcaatgctaactgcgtatagattcgtccaatggcgtgccgctctcatggaacttgctgtgcaggacctgaagatgaaggatgccactgaggtcatcgagtacgacggcgaggatccctaccagatgatccaagtgcacgattacttaaatgtcaagttcttccgtatggatccatctgtccgtgccgcaacgaagaaggtcattgaagtgttcgctacggcatacccagagctcctgagtgagaagttcttcgtcaatgtgcctgctatcatgggctggatgttcactgccatgaagtttatcctgagtcgcaatactacgcgcaagttccacccgatcacaaacggcgccaacctggctcgggaattccctgcttcaattgccgaacagatccccaaagtctatggtggcaagggtccggagctgaaggagaatgctaggttcatcccactgatcgaggacaaggaagaggagacaaagtgcaagggcaagtctgccgagaagtctgccgaggagcctactgttgctgagcccaccaaggaggagactgctaaggagcctgccacagcagatgttcccaaggccgagtctctgaaggaagaagctgtgaaggatggagcccagtagttcaaattggctggtgctgtctgttatgatacccggaggagcagtgaataacactccccgctcttgtgtacctggtttcgggtcatttgtgtgctctctcaagatgcactgtattgttaataccttatggctagccatacctaatactattattatctctttatcacaatgaagattgattgatgtcttcatgaagcgaaagcagcctaatgtaggcttggctgtacggtagcttatacggctgactttagaaccactcgcgcaactcttatcgacaagctttcatcttccttcattcactgtattacttctgtccattgaaatccgctgcgtcttatccaccatttagatacaatactgactcaatagcaaggcctgttattgtctagtctgtggatccgctggcggtggcctcagaatgcgactcgcttcctaaacctcatctgccccctcccttcacctcacttttcgcgatagcaccattattatctaaacccgaatttatctcgatcttttcctcacacacattcattccagaccacggccttccatcatgtctgtctggaaccctgataacatccgcgatgtcgccgaatccgtcggtatcctcaacctcaataacgatgtgaccgagaatctcgcccgggacgtcgaatatcgagttgcgcaggtcttggaggaagcactgaagtgtatgcgccactgtaagcgaacggttcttaccactcaagacattgcgctggcattgcgcaacctggacgtggagccattgtacggctatgactccacccgtccgttgaagttcggcgaagcctctctaggacctggccaaccgctgttctacgttgaggatgaggaggttgactttgagaagttgatcaatgcgcccctgccaaaggttccccgcgaagtctccttcactggtgagtgaatactcttccctacttatgtgctgtacagcctctaacgtctactctagcccactggttagctgttgaaggtgtgcagccgtcgatcccccagaacccgaccgctgccgattctcgtaacctcgaattgatctcgaagggtccgaacgccaactccacactggcggcaatcagtggcacaggcgatgtggctgtcaagccactggtcaagcatgtgctttcaagggaactccagctctactttgaaaaggtctgcagtgctttcttgaacgaaacaagcgaagattatcgcacctccgggtattccagccttcgcgaggacccaggtctgcaccagctggtgccatactttgtccaattcattgccgagaaggttacgcatagtctcaagaatgttttcgttctcactcaggtgatgcacatggccgaggcgctggttcagaacaagtcactttacgtagacccttacgtgagcaaacctactatcagagaagaacatgatcagacgctaaccgcatcagatcgcatccctcgtaccatccattcttacctgcctcatcggtcgacagctcggcggacctgcggatctcgcagagtcattcgctctgcgcgatatggccgcctctctcctcagtctaatcgccaaaaagtactcccactcatctcacatgctcaagcctcgactcgtgcgctcctgtctcaagaccttcctcgacccttcaaagccattcggtgctcactatggtgccgtcatcggactgcaatctgtcggcggctctgaagtaatccgagtgctcgtcattcccaatttgcacgaatatactaaactcctcggcgatggattggacgatgctgctcgtcggccagctgccgagcgagttctgggtgcacttgtggctgtgttgggctcgctgcgtagtagtcaaccgtttttgaccaatggtcatactgtcacagacgacctccgctccagactagttgacaaagtcggtgatatcattgcatcaagaatcgtggaggctggtgaggtgcagctagcacatatcattttggaatcatgaactttcgcatggtatctctcgggtgcttttgcgatgagatcccgatgattgttcgtacgacatggcgttatttcgggcgttggttcagggattatggatacctagtagacatattcaggatgtggatgtgtttcattcttaaataatcacgttgacacacacattgatcagtgtgttttatatggtaactccatccatggatatcctagtgcattcccctatttgatatctatctcgacttttcttccctcgggaaacgaagggctttgctttttgcacatgtgcttactctcatgggtcataattttgtggcgcttgtctgttgtcattcacattggtagtggcttgcgtagaattcatattggtagtggcttgcgtagaatacgcatacatagacgcttgggccccccgttatatgctgagtcatgcatagcttatgtaatgtcttcagggacaaagtttatttctgcctagtctcaccgctcctgtgagaaccagggcctcgctttggcgttttctttcgtctctcacaggttgaaatcatccgtggcagtctgcacattactgcagctctaacttgcccaatttgtgtgtaacatattacagaccccaatactccgtatattccctgcaattgaaactaacacaattgtttccctgatgtcagacaaattttgatccgatttgccccacactgccgcgggcccacaaagaaaatcactcattaccaaccgagctgaccttcagcaaacattttgcacttcccctcccactcgaggtcaccaaggccacaacaaaaactgctttgccaatattttttttcttagcgagagattccttgttctctctagcccacaagtaatcaatccttgatctcgggcacccatcgggcttttgggtgagactgtcctacagacaaacccccgccgatgttcacgactgtggccctccgctacctcgtgctgatttaagtcggacttgtcttcgccttccatgagcccaactgatcttctgcgattcttgtctaagcccgcgaagtaagtgtgatttttccctctgtgtttggaaaagccaaaacaatcaaagccattgaatcgagacatcacggccaatgtctatcttttattatagcactgtttctaaccagcatcctgctctaggcctcgataacgcgactcccgtcgtcaccaacgcctacattttcgaatacccttttttcaaagcagaattctcgtctgctagacccgatactttgaccggtatcggtatctttcaggacgagggtaccgactgctagtcaccatttctcttagcatcttcttcttgtccttcgccttccgccctccttagcagccctttggtctgtttggagattatacccgcctggtctgaccagttaaatctttgtttcagggccttctcttctcagacgggcatcgcccccttggccgtctgggtaagtagacagtgcttctatagcctatcttctcgaagtacatagggcggtccgacgtcactgtttctgcttcgttcaacccaaacaagtacaacagctcaagctacatccgtcatcatggtttacgtcggtattccaacgaactacaccacctcgccgtcctcgttcgtcgcggggaccccgtctctgacaatcaactatgaggccacccaggatctcgactcgaccaatgccttcgaaggtcctgagaagcttctcgaggtatggtttgcgccatctgccgctgaactaggcgccgccggccccgagggcctcaagaaagtgcccggggaaatctggaaggacatgttggacctggtcaactgccaagtgctttccgttatctcctccgatgagatggacgcctaccttctgtcggagtccagcatgtttgtctggccgcacaagttgattctcaagacgtgcggaactaccaccttgctttcgggactcccccgcatcttggagatcgctgctctgtttgcaggcttcccacgcgctacggcgcctccatcccggggtatcacggtggctgcggctccctaccgagtcttctacagccggaagaacttcctcttccccgaccgtcaacgtggcccccaccgcagctggcgcgatgaggtgcgctctatggacaagttattcgtcaacggcagcgcctacatgatcgggaagatgaatggagaacattggtatctctaccttaccgagcctggcaccgtactcaccccaccggcgagtcctaaggaggaggttgacttccgcgagaccgaaaccaaggttctcagcttccctgaagccaaactgcgcactgattgtgatgagcacgatgagactctcgaggttctgatgaccgaccttgaccaggaaaatgcgaagcagttctatctcgaaaacgccactgctgtggccgagaagcgtcaccgcaactcggagaaagacgatgatcatctggatgtcttcagcaacacctccgacatggatgaggagactggtggcatcttgccacccgagctcaccactgagggccacgctctgggcactatcgtctctgaggcatgcggcctgtccgacgtgtactccaagagcaagttcccggatgctcgcatcgatgcgtacctcttcactccatgtggcttctcggccaatggcgttgtgccggctcctgatggcaacgccccgatccactacttcactgtgcatgtcacaccggagcctcagtgttcgtacgcgtctttcgagaccaacgttccgcactctcagaatggcaaggccaccgccgacatcatccagcaggttgttgcgatcttcaagcctggccgtttcagcatcaccttgttcgagactaagcccgcgttggatgagctcgacgaggcgaatgggcagcatgatgtggcgcacgctcagcgccaggctcatcgacgcagcaacaagatggagcatgtcgaaggctaccgtcgtgtcgatcgcatcgtccatgacctgaacggttatgatcttgtgttccgttactacgaacgcaatgactggaaagggggggcaccgcgacttggagagaagggattctgagctgacctggttcttcagccatccgttattggactatctccttctcgcgggtgcgacctttctatccgtttgggtttctgcctacttggcattcaattttgcacagttctttctgttttgtttatttctatttttcgtgtcatctcgtttatttccttccatagtgcacagcatcgcatgattaagctgagcgactcattcttttgtcatttgttacagtggttcagtcgagaaatcttgaaacataggtatatcgagcttctcagaatttcggtttgtcattcctttgatcatacatcatacctggtttcgaagactcattttagagtccattcaagcgtcttgagctgcaatactatcattttctgcaacatattctttccagtgtagagtgtaaattcgaattctaagattgcgtacggagtacagcattcaatgtagtgtcatagtccacctcggacggaaggcggtgagatgcgtccttatcttgtcttttgtccaaattacttccaatcgatcaacgagctacattcgaaaccctgcaaataatatcgctatctacggtcctttgagagatacattactttcagtccaactagcattcattctttgttccaacccgaggttgatatcgaccttcctcccccggcgcaacggcgcagcgcgaaatcctcggccctcgaaagagctacacctggcgctcatattctaccgagaagattgggcattctcgtagccgactattttgaacacaagcttaccgagccatcatacgcgcaacacatcgcgcgcccatttacccactacaacctctcaaaatgtcgtcaccaccaccataccaatcgtcatccaatcccctcaaacgaccctccatctcctctgcctcacagccgattggcaagaaacagcgcatgcatccactccgccaaacttcattcccgaacggcatcgatgttggagatcgcagtttcgctggtaccagcgaagccggtagcgtgacaggcagtttcacagggagtctaggcggagcaagcgcagatggaatcttctctgccgcacggggaaagaaacgcggacgcaagagtaaagccgagaaagagcgggaacgggagcgcgatgatgctctcagcgctagggcgggagattctacacggttcggatcagtcgataacgagggttcggtccgaggtggtccttctggcggcggaggcggcggtggaggtgctgatgatgcggacgattatgatgacgacgacgaggcagagctgtttgggcagcaagaaggagctacggatacagaggctgagaagaagaacctagcgtacgttttctcctgtcttcgtggtaacattggatgaagctaattctcgctcttggacaggatcctggttgatgctttcaaccctatgcaatcggagcgatacgatctcttcaagcgagcgaagctgcgcaaggaaacactccgccgtatcgttaaccatgccctctcacaatccgtcccggccagcgtggtcacgaccgtcaacggcttcaccaaggtcttcgccggtgaggtgattgaaatggcgcgaacggttcaggcccaatgggccgaagcacacgaccttgctgcgcgcgatgcgttcgaggccgaagaagccgctgccgaagccgcggcccaggcgaaagcctcagctgcgaacgcaaattcaaaacactccacaccaacccccacaggcactccaacctctttcggcaatggtgttaaaaaagaaccacatgactctagtcgtacacctacaccctctatccctacttatcagaactctccgcaccaaactcccactcctctccgccccagacgcgagttccgtcttccgccaaacccacaccgtggccaacttcttccatcgcatttgcgtgaagcggtacggcgaacgaagcgtgatggtgaaggtggtggagtcggctactcgggattgagtctggagaacctgggagttcgaggctcattcacgtggaactcggggagtgcaggtgggaggaggcttttcagatgagaactcagtgctcgttgcatatttggtgagattttttactttcttttcatgtctaatactacactaaaattagcgatctggactttgggggaaaattgatacggcagactggctctgatatcacgattcttctcttccgcaacatactatgtatgcatgtactatgaacagacttgaatccagtcttaatttagaacacaagcgtatcaatcgcacattccattagatttgatcgatcgaacccagacgccctcgatcttggcaggggcgaagaatgccggtgtcatttacaacacatctaagtactccgtgcaggcagacatgattcgtattggacaggagctattgtctagggttaattatttgctccattctcttcatgtggtctctcacggtataccctatgtgtcgaattctactgttttcaaacagtcaagtctactcctagtgtaaccgacataccaaacacagccatgttctggatactacatatcacagaagggtggtgcttttctcaacttcatcctgctgcctatgtggctaggtggtctggttgggtacatggcgttctcggaattagggctattctcaatgtcatacagtagacggagcacggagcagagatggactaaatggaaatacatagtagacctatcctttatccccatccaaaatcaagaatgaggtagatcatttattcgaccctgcagaaagccaccgcgcatgtgcagcccttgctgctatccgagtggcgttctcctctccgttcctgcaataatgtgggactacatagtccgatgtccacctgtctcccacggaatatgcgattggatctgagcacatcagggctggcgcttgcagggccgcgtcgactgcaactcctttcttccttggcagcctctttcttgatgggatcgccgagggaggggattgctacgtatcccagtttcttacatgtctctgctttctttgtgttccttttactgtcattctattctttttataccctcttttttcggttggagtgggatagtcgtccttcttatctcatagcctgattcttattcggatattggacgtctttgacttgcgtttataatgcactccctccagccctccaatctatacacccgtttaatagatacaatacctacagccttgccttggtcctccggggatccatcggtgaaaggagatcccaggaagagtgttaaatgggttgacgtatgtcttgaaagcagataatatacgatatttctaacatgtttaacttctagggcctgagaggaatcgcctcattcctagtagtgctaacgcacctcgcccgcgcttgggactatgatctattctcaccacgcgacaacgaggacgccagtccgcgaatcctccaatggcccatcctccgaatcccctggcaaggccgtctaggcgtaacgatcttcgccttcctaaccggctacgtctgcgcgttgaaaccgctcaagctgtcgcgaacaggtgatacattaggcgcattcgagacaatagcaaaaagcgcctttcgtcgaccgccacgactcatctttcccgcgacgattgccctggtcatctcgtggactgttgcgcaattcggcgggtttatagtcgccaatagatccgattgctggtggtgtcggtatgccgcgccggatctggaggattcgttttggaaggagcttgttcggttgccgatgaatttcttatcgacttggacgaccggatatatggcgtacgatgatcatcagtgggcgcttctgccgctgctggtgtcgtccatgttggtttatctagtgctttcggcgactatgtttgtcaagtttcggtatagggtcttgatctatgttgggttattattgtatttccatcaggatgcagccaaggatataggtgagtgttgctcgtggaaacaacatatgagccttcaatttagtgctcgtggcagacaaaatgacccatcgctaatgccgagtacagaaaccttccaaatgcaagccatctacggcatgctcctcagcgacttctcctaccacgcacccctcaaagattggatagaagaccacccacgaggccggaagatgctcaccatcccgctcactatcatcgcattattcctcgcttcatacccaggcgaacaccccgaatgggccggctggtccaacgcaatgctcgaagcaagtcaatacatcttcccgccagacgtcaatgtcgggaaacgctacacggccctcgcaattgacatgatcatcctcgcgatcttcttttcgccttcgacgaaagacttcctctccagcagactcctactctggctcggcaagcagagtttcgccgtctacctcatccacggaaccatgttgcgtgtcgtgctctgctggatgctgtatggtatcagcgggcagccgtgggagggtcctgaggcgttgaccgatgacgtccgcgacgactggttgcctatccggccgccgtgggtcgttgcaattagtattccggtctggattgggatggtctatttccttgctgcgctgtggacggcgtatgtggatactttctgtgcttctctaacgcagaagctggagagggctgcttttgttgaggacgagaagacgccgttgccgttgcaatcggtccctatgcagacggcttgatatagatttaagttgactcacctgggcttttggtgttttgtggctgctttccttcgacatggctggaccatggccatgggtgtaaatatgacttgttctggcttttccctttgctcttcgcgtctttatccaatgcaatagcaaaatcagtaatgaaagcttcaattatagaagtgtacatagccaaatggagattgtggtcaagtaaattccactcttcaaatcacgaaaacaaaatgcgaatgctactgcgccatattttacagtttgtctaaacacacgccgatcaagcacggcgagagccacgccgcccgttgggtttgcgagctgccgtctggctattcttcaaggacttgcttgccttggcccgttcgttctctagggtttgcatgtgctccttgcggcggagttcgttacgctccttccgcatgagctcatcctcgtcttttcgctgttgttcgtattcatcagcgcgcttcttcttgtccttggcgagacgttgctccaccgttgaagtgccaatgctttctgagacagactttgagaagttggtgccgactttgccgaatttgttgtagatgcggtcaatcaagctgattttcccaccttgttccggggaggcagctagttcgctgcgtgctttctcttgtgctttctcttgcgcggctttttccttctcaagccgttccagcagcctgcgaaggggcttgctttcggtgttttgggtaactgccgagtacttcggtccattggatggtctccgggcgatcgacaggtgcatccacttccggaaggcctccgagttgatcaaataagtttgacctaggccgaaaataccacttgccacaaagtagagctgcagggcactcggcatgaacgccatgaaggcaaaagacatgacagggaaaccatacacgatgtactttcctgcttcagtttgcatcatgggcatagcgccggattcaccacctctctgttatcttggttagtatcgcagttatagtagaccatatgagaccaacttaccctcagagacagacacagcgtgcctgcagccatcataggcaagatgtacgtaggatcagcaacagtcagatccttaagccatcccacttgttccgcggctagggccggcactggcaacgtagtcattgctcgcacgactcggaaacatccgaaaccaagtggaatttgcaacatgggaataaatgacttccatgtgacaatgccgtgcttctggttgatctcgttgatctgggccctcaaaatctgggcttcctgctggttcccatcggtcgtggcagtaaacatccttttccggaggggctcagtctccggtttggcgttggtcattcttgtagaattctcggaggcgccaatgacagccttcagcattgccacacgagtcaaaataccgacggccacgatactagcccaccatggcaagccggtccatatgtgagtgtgctcgataagccattgcattgtcgtcgtgaagccccagccgaagtccagcccaagctccttgagatatccaatggtctccgggatcgcggtaatctcagtcatgtctaccgtatttttcaatgagccgtctatagcatattcagggagtacgtcggggtgggtagaggaggtggaattgaatcggattgcggccgggccgacaacagctggtgtcatgcgccagggagcactgccggatagtgctgatttcaattggctccgctggctagggaaccgcaggctttgtgaccgcaaggtagacatctgcaaagccaagtcaatttcgatgtttttgcaaatccgagtcaacgggagaacagacagatctagaggagcgggacatggcggtcattctctgacgggcaagggcagcggctgcgccggaccctttcaggccaacagatcccatcatggtggtttggataattagaaatggggagatagccagtacggaagagttgttctcgtgccgttcggcgcgactttttctgcccgggcggtaaatgctgacccacggctatgttgtacaggacaggcacagagactcggagattcgaatatggaaatatagataaatagatggaattcatagacttagatattctatatggtaacaacatctggttgcaaatgtaaatcctaattcgccaaacgcccccctgagccaaaaggtctatgtacaaccactaaattcaggtgtgcacagaaagccaggtatcgatcccaaatcacatatgcttcgattttgtcctccgcgtaaatgcagtcattgttgaacggatcaaacggcagaaacatcaatcacttattccaaagaagcagtgtccctcagtccagggcgtctccgctccgaaggaagctcccgcatttcaacaccggggcccactgcatgtgagcggcgatggttggggaagatctataataatgggagcagctaatcagtcatagaatccaaattgacttatgtaaaactactcataccttagtgttagaccatccaaggcggaaagcagcctcgtgtgcgaacagctctccaaagcctagcatgagaccattgacgaaggggaggaagaggttgatgaccgctccgcgaaggagaccccacacacttggcggcttataaagcatcatgagtgagcttgtggttgatgggaccgaggaggacaattcatggttcgcggagtagttctctgagtcggaggggacggtgatggcagagtcgtagagctcggcgggcgaggcggaggtggggtcggaggccattattaggatcggaaaagaccgaggatttgtgttgtgtctttaaataacggcgtctgagttggtgttgacccttgatctcgagaaaaaggtaaagtaaaatgatgcgatggtcccgatgagctcgttggggtatcatgtgggttatgtcagcaggttttgtgccgcgggcgcctatcccgttgaataaacaatggccttcctaactaggagaggcgattacaaccctctgctttcaatcttcgaatgtttctctttatccatcactaattttatagagctcatgtttaatgtaaagaaaaaaaaactagcagcacccaagatagtcacgcttgttatattcattgacgggaagtcacttgcaacatgaagaacttgacactaatggaggaatgattcgagcaaatagatatgtaaaatacaactatcagccaagcccatcgattccatctatcaatgcaagatgattcctgcttaccaccaccgtctacatctcgagtgttctctaatgtatcaaactattcatcccactagatcaaaacgactccaatcggctcataattatgtgctcaaaacaaattttatattaaaaaataaaaactatctatatgttaagtttcaaaaccaagtatatatgcaatggatatcaaaagacgccgccaatgtcatccatgttcttttccacatcagtcataccagtaaaccatttccacaatgctccacaagctgaaagaaatgaaaaaaattacctcctttttaaaaattcccgggaccaattcccgagatcaagtttggcaacccctatgccttgacagccttctcctcgtcctcatggtaagcgaacctcgacagacgacgaatggcctctcccttgaagtagaagacatagggaatggcgcagcaagccaggccgatgaatgcaagaagcgaactggcccattcgtcgcccagacgctcgtacatttgctctgtgaagagcacggtggaggcaccccagatggaacggatgaaggtcttggctgcgagagcggatgcggcttggtgctggtaggtgtcaactggagagatagttagcaatgactcaaatcaaaaagattgaatgcttttgatacataccaaggtagttgttggcggagttgtacagcaggataataccgaatccaacaaggaagcctcccatagccggtcccatccagtgaatgtgggggtaggaggtccaggcgaagacgaaaagaccagaaggcacacaccagcaagcacacatcatgggaatcagacgtttttcggcgggaggcttaccaccgcatgccgcagacattttgaggtagtgcttgttgacaaaaggagcgcaagctgcgctcatgaccacaccgatggccagaggaatgaacatgagaccggtattagacgcgctccatcctttgccgccctggtaaacaatggggtagctagaaatatagttagtttccagtctcttttaagtgtataaagacaaaaggttgttcacttacgcaacgaagaacatgtatagcaagccataaatgacagacatgtagagagaaatgaacaagacgatgggttcaaggaacagaagctggaaggggcgaagaatgaagacgcgcaactcctcagccaatggacgagcatcaagctcggtttcggtggtatatttagggtcgtcctcggtcttgcggagtttcgctgcacgtctcttcagaataattggtgcgaatgtctcaggaacggtgaaactgatcatgacccaggcaacgaaggccaggataagctgaagccagtaaagccagcgccagccagcattgtcggccaaaaatccaccagcaagtggaccgatggccggaccaaggaagggagcagcgctgaaagcagccatgggaacaccacgctcctcgctcctccacaaatcggccaaagttccaccgacaagggtcatgggggcactgaaagcgattccgtcgatcaaacggcagacaatgagagttccaatgttcttagaaacagcacatggaatgacgaaaataactgcgagtgccagggtcagagcgtagacgggtcgacgtccgaagatctctgacatcggagcaaagaccatgggtcctaaaataaggttagaactatgcaacccatatcacacatctgtattactcaccaacaccaaatccaataacgaaaaccgtgacaataagcaagctaacttcacggctgacatggaaggactccatgggtccctcaatatcggctgtaatgacactactgcaaaaggcgacgacgaagcaggtgaatgcgacaaccatcgtgcaataccacttgtaagccttggaccagttcttgggattatcaggatcgtcgatggtgaaggtcaccatcttccaatcctcgaatttaccagtcacattggacttgatcggcctgatgatttcacccgtctgcgtctcagtgatgtattcgcgtaaatccgcatcatcggtgacctcgcggacaggtagatcgaggtaatcatcgggtacggctgcattgttgttctgagccccgagggagaccgtccggatagcctctactggggtcccatctgtgtgggtctcagccgagcgtggagcctccatgttgaaggatatgactgatgatggagggctgtacccagacaaagtatgaagtgctgtgtagttatgggtgcagggtggtataggcgcaaggggggtataggtgcaaggcgttgtattaggtgcaaggtattgcgatggctcgagatgttgtaatggtggcaagctatggtcatacaatccgggggggcattcttttataattcaactccaataaaattcggcgccgaaatttcgagaagtgggtcatgatagaaaggaaaaagcaacaaagaatgatccatggacgaactgttcataacattccatcgccgtttttcctacaagaagctctgatatcggcccgcaaccaggtgggttgcctaatagggaatggcggaactagcctaatcaggcaatatgcgacgacagacgccttggcattacagcttgattcatgatacctcattttcctttgggaaaaagacacttgctatacttttctattaccaatgtgaagctctagacttatcagcgtgcagctctactcattggcatgtcggtaagcccaccctggcgggcctttccaaggagactacgactgttacacttcggagtagagaatgcgctttccatgtcgatcaatgtgattgttgagcaacaacagctgaatgcgttgtagcctgggatatttcttttgctgctgtatacttcctatcttcttcaagggatgtctttccgagttccagcttggcatcagcttggcatcacgcgaaagcgggtcgggctgtgaccaccacgcgtcgtgagatcaatcaaggcgatcgtaatatagaggccgaattaggagagcgagaattatgaaacatagtcatcctttagatcaaacaaaccttaaaaacggattcgaacacgtagatatccaatactccgtagttgtatctactttgttctggaagagacgacctgaaacagcattgaacttattttgatcattagcttggcctaggcatattatgcacattgtcacatggatttgtatacatacaacttttccgcccagtgggccacggtaggttaatatgactgtgtttttgtgccccacctgtatagttcggaacatatcgcccaatttggaagactactttatttccacattgggaatatcaaacctctgcaaggcgggatgtcgattcgccacggcatttttagatgttctagattccttacatcaaacctaggctttgttcgctggccaatgagagcacttgccagcggttatgggtcccgtctagcatctatgaagctaggtatcttttgtatgggtggaccatataaaagatacaagtctcccagtccttaccccagaattagtgcaatatgtgtttttccggttgtttgtgtggaaatttttctccgtattattgttggagggcatactccgtactccgtaccccatacccataccccttggtggaaattctacccctatccccataataaatgtttgtttttatttcttcgactcatgtatacgcaggaagtacactatggattaccaatgtcagataaggattccgctagtatacgagatccctcgtttcaggcagacccagaccctaattgtggcgtcaaaatatcacagatctcatcatgatgcaaccctggaagtgtcgcaaatgtcacgacgccgaattggggtgaactcgaactttaatttggtggtcacaccggtatcgtgcgtataagccccacttttcatatatccaaaagtccaaattccaaaaatccacgtctttccaaatccgctaactcgggcccgtaccggaaaattccccttacgatcatgtcggcctcgatgcggaagatgccgagttttatgcaagttgaggagcctgcggagttaggcaccggcggtgacagcgcctgtttgcgaggtttgtttactagctagtagttagatcgtgtttctcctgcttctctctctgctcactttgttgcctatggaatgctactccgtatgttgtactcgtatgcagtcttatatctctcatagagatcatccctgcggtagtcatccctagaataggctaagctttgtgccacctctaggcggatcctgaggatcaaaggggggctctcacgcaggggcttttgatggggccactacggagtacacatagagcccctttatgcatgggccggatacataacttggaatttagagaaccaaaattttaactataaggcgctttgacaatatggataacagggtccagggttaagcaaaggacgggaatttctcaattagcttccagtctactttgtaattgagagaccagcaactagcgtttgtattgtaatcaatataacggaaactagcttacgaaaaagaaaaagaaaagaattcctcgcagcttgttggtgtggccccgaattacggagtactagtcttcagatagcagaaaccttagggtttattcagctctgtagatgcccaacttcagcagattgctacccaaatatcctcttatttgatgattggaccgatgaaggtatgttcgtttcagacaatccatcaggcatcaagtacttcgctcgatgttaccaaatggagttacttttccgagtacgcggctaacccctatgatattagcactcacttgctcacagaccaaatcatccttatcgagttcgggctgcgttcttcacgaaagtgttgctcgaattttcaccctagcttcatattcatcggcggcccactcacctctaggcgaactttatgcttatcgcagtcttgtcaagttcctactcaggtggaacaatgaggtgtggtcccaccaacttctgctccggcacggacttccagtagctcattaatgctgctggttaaagggggtatgaaaattttcagtagattgtgggcgctaagccctgtgggccaagctggaagtttacttagccgcggaggtcaaacttcgggagagtaacaagggtttaatgataagctgaaagggtggtttgaagattctatatcaaaattatagtgctttcctcgttgacgattgacgttcaaattgtactctagctctttctgtccttgctaggctttcaaggtgtttggttattgtcgtatgaaataagctcaaatactaagtagggtgtgatgagaaacatttcaattatgctgtcttcggtgtctagaatgtatcccaatagccataggttttccctttttttgaactttatagatgaaagaatttatatagcaaccgtgccaagcgcctaggaccaccatacatatctggtgttggagcgccccaccaaacgccagatctataaattagacttctcttccaccctgtagatatagaaaaccctccttcatttggaattggttcagaaagagaatcaggtaaaatcaacgataggaaagaactgatcctcgtattcagactcaaagcgactgagtacagcctatattcaaactctttcctgcaatacaacatactgcaagttgtatgcatttacgagttcaagattcttggcatgcaagaagcgcatggcgagtcatgatgtcaagatagggttagcgttgaagccacccaattccataaataccaccaataggcatcgcggcggagttcgaggatttaggagcgcgaaccgtaagaacgagggaaggatactcgttagcggccaaatcgacacgggtgccgttcggaacgaatgcccaatctgcttctttactatataggaatccgcaagttcgttctatgtcgtaagaatcagcccatagatttagggtagccgagaacgatgctacggaatttttcgatcatactttcatgttgtcaacccggtatttttcaataagatagcagacttggcgtacgcgactatgattcgaacatctagacaaagtgcaaggtctgtttcgatctgggtgaaaaggcattgcggaatttcatgagcccagatatattgccatggttggagggtatacgcacaatggtatgcctatcgaattcagctctccgattgtgtcgtcgacatcatgtaggaagtgtgggcgaagttttcctgcgttggggggcacgacaagatcgttcgactccataagagacggagatgattgggatgagggcgtagttgcagtggtctttgagcctcccgaagcagaggtaaattcggcctaaggttaatcgaatcgaggtatgccaggtcatgtctcttgtgacatgccaggtcgatcgaagaaagagttaaaaatcaattcagaatatttatgatgaagatggaaagaagaagcaagtgtagtagatggagcctaagtatcctttatatggtaaattcatacaaaagatacctaacttctagtttggtgtttagtggggcgcgacaacaccagacatgcaccagacatggggtggttggcatttgatagggtcaattgtaatattttatgaattgacatgtcccttcagaagatatatgaataaatacaccattgtatactatgcaagaaaatgaacgaattgaagaatttgttggtgtcaaactttaaaccgttatcgtcacatgacctagtacgataagccacaacgggtttagggcgggggaaactcatttctcttacaaaaaaagaaaagcggcgatagagtcatcgccggcctcttctagcgatcttctcaagtccacttgagagaggcactcgagccactcaatctacttcggtatcaggagaatcaattcatatctcctgtgtcatacttgattgactcattgggagaatccccaatttgcttcacgatgacttctaccgatacttatctcgccatcccgggctctgtcgccttttcccgctctcgggggcatgctattgctgatagcatcggtgtccaggacgtccgagcccagtggattcactatgtgcatactacccagcccttggaagagcctcagcgtgccgtactcgagcaattgcttcagtacggcgatatcacagacatccctcctactttcgaaaccaccgacggtcagtccgataccttctatgttttcccacgcaccggtaccgtctcgccatggagctcccaggcaacaggcatttcgcacgtctgtggcctgcagaagtacgtcaagcggatcgaacggggtatgaagatttcgtgtcttcgtaccagtgcggaggactacaagccgaagtacatggatacgcttcatgaccggatgactcagatcattggcaaggatgagcccgatctgagccttatgttctccgagcacgctcctcaacctctcaagactatctccctccagggtggtaccaagtcccccaaggagattctccaagaggcaaatacggagctcggcttggccctcgatgattcggaaatcgaatacctggccgaggcctatggtccaaatggtgcgattgcccgtgaccctactgatgtcgagctcttcatgttcgctcaggtcaactcggaacattgccgacacaagcagttcaatgcttcctgggtgattgatggcaagcccatgccaaacagtctgtttgccatgatccgcaacacacacaagaagcaccccgaacacaccgtcagtgcctacagtgacaatgctgccgtgctagagggccccgaggccgcgttctgggcccccgatccaacgaccgggcagtggatgcataccaaggaagttgtacacttccttgccaaggttgaaacccacaaccaccccactgctgtttcaccctaccctggtgcggctacgggatctggcggagagatccgtgatgagggtgccgtcggtcgtggctcacgccctaaggccggtctttccggatactgtgtgtcggaccttttgattcctggcttcaggcagccatgggagctcgatgtcggaaaaccaaaccacattgccagcagtctggatatcatgttggaggcacccattggcagcgctgctttcaacaacgagttcggccgtccttgcattggtggatacttccgcactctgctcaccgaaattgatgtgggcaatggtgaaaaggaagtgcgaggataccacaagcccatcatgatcgctggtggtgttggaagtgttcgcccacagcacgctatcaagcacccagatgttgtcaagccgggttctttccttgttgttcttggtggtccggccatgcttattggtctgggaggaggtgctgcctccagtatcgcttctggtgagggatctgctgagcttgacttcgccagtgtccagagaggcaatgccgaagttcaacggagagctcaagaggttatcaacgcctgtgtggccatgggagaaaacaaccccatcaagttcatccacgatgttggtgccggtggcttgtccaacgcccttcctgagctgatccatgactcgggcttgggagccactttcgagcttcgtgaaattgataacaccgaccgtagcatgagccccatgcaaatttggtgctgtgaagcccaagagcgctacgtcatggccattggtgaggagagcatgaacaagttcactgctatcgctcatcgtgagcgttgtggctactccgttgtcggtcgtggcggcggttcgtccgaagaagaaaagagactcattctccttgaccgagattccaaggagtacccgacccccattgaccttcctctctctgtgcttttcggaaagactcctcgcatgacccgcactgtcgattcgcggaagctgaagctgcccgccgtggactctagcctcagcaagtatcttccctctctcacctcgaggacggagattattgatgaggctatcaagagagtgttgtctctgcctgcagtcggctccaagtccttcttgatcactatcggcgaccgcactgtcggcggcctaacagcccgtgaccagatggttggcaagtggcagacacccgtatcggatgtctcggttactgccacttccttggcccagggtatgaagaccggtgaagccttcgctatgggtgaaaagccgacgttggctcttatctccgcggcttcgtctgctcgtatggctgttgctgagtcgctcatgaacctggctgcttccgatcttgtcgttcgtctcagccaagtgaagctttctgccaactggatgtctgcgggtaaccaccctggcgagggcgctgctatctatgaagccgtggaggctgtcggtctggatctgtgccctaaacttggtatcagcattcccgtcggcaaggattctatgtccatgaagatgaagtggaaggatgagacctcgaacgaggccaaggaggtcactgcccccatgtcctgtgtcatctctgcctttgcgccggttggcgatttcaccaagacctggaccccggctcttcgcagcttcgaagaagtaggggagactgtccttatgtttgtggacctttcattcggtcgtaaggcgcttggcggatcggctcttgctcaggtcttcaacgaagtcggttccgagtgccctgatattcgcgacgttgatctcttccgggacttcttcgatgctacacagcaacttcaagaagtcggaattgtcttggcttaccacgatcgctccgatggtggtcttctgactactcttgctgaaatgatgttcgccggtcgctgtggtgttgagatcatgctcgataacatatgtgcctctcacaataccaaggatctcattgaatgcctcttcaacgaggagcttggagccgtcttccaggtccgcaaggagcatgagatcctgttccgctcatgcttcgccacttgcggtcctcctccgggtctgatccacaagattggacgtatctctcaacagcccaagcagaaccttgcgatctactacaaggctcttctgatttaccgcaacacccgttctagcctccagcagacctgggccaatacctcctaccacatgcagaagatccgcgacaacgcggactgtgcggagcaggagtatgccaacatccttgacgacgccaaccccggtctttcttggaaccctaccttcgaccccaaggacaaggccttgcctatgatggctagtctttcccaatactcccccttcgccaacaagccccgtgttgccatccttcgtgagcagggtgttaacagtcaagctgagatggcatttgccttcaatgccgctggcttctccgccgtcgatgtccatatgaccgacatcctctccggtcgtgtgtctctctccaccttcgccggtctcgctgcctgcggtggtttctcctacggtgacgtcttgggtgccggccagggctgggccaagtccgttttgctgcacgagaacacccgcaaggagttccaggagttctttgaacgtccggatactttcgccctaggtgtctgcaacggctgtcagttcctgtctcgtattaaggatctgattcctggcgcgggttactggcccagcttcgagcgcaacaccagcgagcagtacgaaggccgtgtctgcatggtccgcatctccgaccccgacccatcctgccccagcgtctttttccacggcatggacggcacttcgctccctattgctgtcgctcacggcgagggtcgtgcctcgttcgtcaattcccagggcatctcggctgccgacttcgttcgcgagggtcttgcccccgtccgattcgtcgacaattccacactcaagcccaccatgacgtaccccttcaatcccaacggtagtcctgagggtattgccggtgtgcgcagtgccgacggtcgtgtccttgccatcatgccccaccctgagcgtaccatcatgaacggtattgccagttggttgcctccgaacgccgagtcctggggcgagattggtccttggggacgtgtcttctacagcgccagacgctgggtgggttagatttcttagttttatatttacggagcttttcttatcctttttttctttctcgttctgagttcttgtccatattctctttttgatactggagttgaacatgtcaaaatagcctctcaaataaatataaattgttcaataatatatctgaataccaatccaataaaacacaacgataatatctgaacggagtttatatagagaacctagacctaagggccacggggaattccgcatcgaacgtaaagacgccgagcctctagtgacgacgctgataaagctgatactttttttatagttacctatgttgaaagcttagatataccatcgactaacgagccttatggttcttatctaggcgacctacaaggcctcagctgaatagccggaggttacattcaagtgcccgcctctacctagctgtgaggaaagaagcctaggacttcattttgagacagatattcatgcacgtcgttgaaaaagtcattattgcatcttccactagtacttacgtcaaattttaggtcatataacgccaactccccgctggaaccaaaacaagggtatttgtatcaaagcctacgccaatttcgccgccattcgagcctgtcggcaagaatatcccaactttgcagcccatctgcacgaactaaacttttcaagccatccgtgacaaaggtcgttagatggttgaactggtaattgaccgttttcagctgctggctataggtcgagtcacgaaatgagactgtgagtgtgtgttcgtgatcgtaggcctcgttatcatcatcatcttcatcatcatcagactcgaattcttcttcgggttttttctttgtgcgcagcgccttcggattctccagatattggtcttcatcgccgagcaagtgcgcggtttgtagatctgcgaaatgaacacacagatctaagaaatggatgattgcatcgtggatatgtgataaatcttcagaaagaagacactgggcttccaaagaggacatgtaggattggtgggcagctatcatggcatcgacatcttgtgcgccagatagatctttgtgtagagattgggttgtggtggttattacgagataggtcagatggccgtagatgagatcgaggacccagagcatgttatgatgtagagcgtgtaccaatgtgtccttttcgtcaggtgcgatgatacgggcgtcgcgaatacgctgtttcacaatggcatatttagcgcgcctgatctgcatcaggaaggtcgagattcgttggtatgcctgtattgcgtcctcggtgattatgttcgcaataggccacgggaggccataatcaattgagattgcttctagaattcccacggtccgatgatcattttgagaaactcgcaatgaagtactagcaggccgcacaaggagtcttgatacgtcaatgacggatattgaactgaaagctgtccttgatatctcagtgagcaggaatctgtcgtcccaggaacgaccccgatcgatcaactcaaagatttttgcgtcaacaatgctgatggcgctcatgtctttggcaaggtagacatgttgaagagcatcaagggaggtccatagtccgcattgttggtcgagttcagttcgtaataagctagcactgagtgaatggtccacatccacgagtttttcaaaagcagactctactaatgcggggaaaggaagtaataatgaagaatcctggcaatagaagtcctcaaatttcatggcttcaatgtctggtagcgcatttagatggcggagaaataccatgctctttcctgcagtgaagactttctgcacaccggcctcgagaaactgggggatcctctgctgcctgtggcccgtatcaagcacaaaccagtcatgccaaagagtccgcagatccccattctcacgatttgttcgcacgaagaaagtgctgtccgaagcatcgacctgacctgtttccatccagagtcggatcgagcttgaatatgttttgaaacacataaaaaatagctccgccaggcgctgagacgaactttcgtcgccaagggcttccagcatgcatactaagttgtataaggaatcaaggcagcacattggttgatcatttgagtttctttctaaattggcgatcatgtctgcgagcaatgctagctcatgagagtgctgacgaacatcaacaagaagctggatgagactgacagttgaaccgggtgaaaggtatttgcactgaacttgagataagactctatcaaattcaaggagacgctcttctaagctccggcaaaacgtttgcatatatgggatggtctgtggaagcttggtgaaataccgtacagcgttgagcttggcgcctatctcaatgaaacactgcaaaagcgatgccagggcttcgttggatgaatgtgcgagtgtgtatcttcgatccactccaaaatcatcgtccaagcgcacgtaaatagacgtgggaaggccctgaaacatgaagattgtctccctagcaagctgggattctgtgataagtcgcgaggtggttgcttctgcttggggcaacgaatggtgattctcggctctccaaaattgggccttttctatagaggcaacaagatcgccatcctcttccgaaacaaaaacgtcatctggaatgatatacccttcatccactgttgtggcggattgaggtctgtccttgggaagagatacatcactggcaacggatgaaaagtcgtcatctgatgagtcgccagcaaagtctacttgttcccaaatttcttcgtcgctgaatgccgtcccagctgcatcaaggtccgaccaagaaagagtctcttttgcttctggtgccttggcccgttccttcggacgtttgaccgttgacaaaagagcggggcgatctgagagttgcaataagagactcagaatctctggaagccagggcatccggtcgctctccagctccgcaaggcgggcgtgaagagcttcagcaagttcatctctattcaagatttgaaacttttcctgtagtccctcgagttgcttggcgactgcaaactggtcggtgcgcgtatgagaaccagttcggagcgctccttgtacacggcgcttcagactctggacacgtgcagacccctacttagatatgagtacaccgggtgtgacgatatgagattgatggaaattcaatatattaccttgtggtttggtgatatcttagcgacagaagtgattaaggcgtcgataagcgtactcagatcagccgctagagccatttcaagacattggctcggatccaagatccaagataaatcacatcgagatgtctctagacgtcatagagtgaagaagcattgaagtgaagagagacccggctgttttacgtggatggcactagtcccgatgaggtaagatggccactcttatgcgcgcctctctctctctccgaccatctcccccctttaagcacatacaatcatcatggctatcgcgcgtccgattcgcatgctgggtgcagcatgcattcttctttgtctatttcttgtcttccaattacaccagagctcctctgaagaagggtccaagttgcctcatggcatgaaaaaggatcctcttgtagatcgtgcgtgaccccagtttcttgctacacctcccacaaccatcgcactctaagtgccatactaactgatttgatagcgaccggcgaaccggtaggaaacttatggcgagcggacgaacacgattactcccccaacagcgaacaatcggcccgcaccaatgctgcgctcattaccctcgtccgcaatgaggaacttggtcagctgctctcgacaatgaccgacctggagcgaacatggaacagcaagttcaactatccctacatcttcttcaacgatgtacccttcaccgatgagttcaagcagaagactcaggctatgaccaaggccaagtgccaatatggtacgcattctagtccggatagaacgagaggaaccaaacctaactttatatgcagaacttgtgcccaaggaacactgggacgtcccagaatggatcaatatggacctcttccgcgagtcggcaaagcttttggaggaacaagacatccagtatagctccaaggtctcctaccaccagatgtgtcgctggaacagcggcatgttctacaaacaccctgccctcgaaaactaccgctactactggcgcatcgaacccaatgtcaagttcttctgcgatgtcgactacgatgtgttccgttacatggaggatggcaacaagacctacggcttcaccatcaacctgtacgacgcaccgcagagtatcccgaccctttggcccgaaacccagcgattcctcgccgccaacccgtcgtacctcagcgacaacaacatgtgggagtggattacggatgacgtggctcgtcccgagcacaccaaggccgcgaatggatactccacctgccacttctggtcgaacttcgagatcggtgatctcgacttcttccgcggcgaaaagtacgaggcgtacttccagcacctggatcgcgccggtggattcttctacgagcgctggggtgatgctcccgtccactccctcggcattggtcttttcgccgatgccgccaacgtccactggtaagtcacatacttttatctcatttaagaaccctcactcacatgtatctccactaggttccgcgatatcgggtacaaccacatcccgtatctcaactgccccaattctcccaaatgctccggttgcaaagctggccagttcttccaaggcgcagacttcctttccaaggaggattgccgacctacttacttcaagtatgttggaacgcactaattatcatggcgtcccgtttgagctgttctctcgtctcttgtcattctggagagtgcctcacgactcgattcttgcatcaccttgcatacccctatgactttattcctgaatatcagtggcttggtacccggcgtttgagcggacacatacctgtgtgtattgatgattttgtgttccccatttttccctccctgtttttgatttaattcccttgtcacgaaatacgttcttggctacgttgctgtcttctggagagctacgggggccttgtctacattgtacttatatcgcttgggcatggtcattggtggaggctctgtttatttcggtctggtgcctcttggcctgcttgttgcagttgtcattttgtgtgatatattggctacttaggaacaaaacccgagtcccaacccaacctggctattctactattttgctgaagcaatagaccttggataaagtataaaaaagttgataattaaggaatgaggattgaggatcgaggattgaggactgacttgagcggttgataatacaacaatatgactgaacaagatggaatcaagatagattaagcaccaaccaaataaggcacacaagacctttttccatacaacagcagcactaacaacacgagagatctctaaagtatgtatacagttttctcttctacccgacctaatcctcagccagtcaaacggtgctggctaaacaacgtgcgagggggtactgtttgtttaagagaaaattgacgtaaaagtagaattgatgaggggaatttacgcctcctcggggtagagctcctcccggagagcgacgcccagctcgacgcgcagaccctcgagagactcgaggtattgcttgtactggtcggggttctcgaccttggccttgacgcctaatcacgaaggaatgttagcttgggttccatgacgaacgagactagtgctccaggataggatgttgcggaagcgtaccctcgaagacgcgaacagcggtagggaagtcgttaacacggcgggcggccttgagggcggcggtgaggactgcgacggagggaacaagatcgtaggcgaagcagttgttcaggttgcgctgtttgcaaagacatgcattagccatttgtcgatggtgcgtatataggagccgcatgttgagtgatgggtgtggctgatgccatgtatcgcacgccgatcaatatgcctcgggtgaagtcgagataagtcatacctgaagctcgaaaacgtcctgcacaccatcgaattccttctcgaatctgccattgggatacacggtcagcatgagacggccctatcatgtcgagacgattgccgatggtcgttccgggaagcgcctaacatggaaatgcagggcgctggtgtccccctcctccggcctcaatggcttgcgattgggggcgtacctggcagtgaactcttcgtatgtctcatcctcgtggccggagcggagcatggaggtagtaccgaagttgtgggcgcgagcggcggccagagtcaccggagactgcatccgggaccgggtcaattggggagctctgaaggagccggtagagcgagcggcgcgggtcgccacgcggaagatggatagggacgacattttcagaagggaaccacggtggaccggacaggaacaatagtgaggggagagaagtggatgggggcgggaaggggaggtgttgaaatgcctctaggattttgcgggtggtgtggtgttggcgcctgaggcagctgaacgggtgctgagtcatcatccgattggccccgttccagtgttctgatctctaagggtggccgttgattggctggagagttgtcggtttctacatgcgtgtcattggtcggtgttaggccatgacaagtcgagttcgtataaggttattggacttcttgttcatattgtaaagatatataacataccatgatggtaattgatgttcaagatatattgtgactcgattgttgtgcagaccggtagataatgattcgagcaattaactccaatatttatcgattgtaaatcctacaaactcaaggagggtgggcaagaagataatttgactacatacatgagtaatagtaatatgagtggtggcttccgagtagagaatagtgaaaattcgggttattatagccggcaacatctgaatcgaagatcttgatagcacgtgaagatagaggattgacaagtaaacaacgtagatattaatctacacttgtttagtcggatatgcttctatatcctgtactgtgaaggtgacacaaggtagaataaacgacctctatcactccgtacccctgtcaagctactgccaattgaaagcttctaatggtaatcaattgtaacccaacgacaaatgactggatttccaatgcaacgcttcggatatggacgtggaaaacggagactggaatcataatgcagcattagctatacagagtaaagtggtcaattgcgaaagatatgtacatagatcagccctcgggcttttatacaattcatttctttgtataatatataatgcgctagttgttggcatttacactagcatgtgattgtttcacaccaaggacaacattgcattcggcaacacagtactctgtacactatattgtgatctggggtatcatgaatcgcaattagatctaattctaatagattgaatctactaaatattagatatgttcggacaatatatccccagtcgatgccaccgggacctgatcttccccttttttatggcacgctaaacccttttgggccctcaacggacgcgccggacgcaaaaagtcactgttctcttatttctccagctttctccctctctcctcttcccctttcccactttcgtttctttagctttctttcatttcctttccttaatttggcctttctttgttttggcggtccattgcagtcccattactgccccgtcaagaaaagaacaggttgccttcccgggctatctctatcttcaattctacatccatttggtttgagagaacaacccaataccctcacaatggcttccgaaatccttaaatatgtcgatgtcccgactctcgatcgaccctttggtgtgcacctgtggcccctcttcgaccaggcctacgagaaggtcatggggtatcccgccagcgagttcaacttcaccgagggtgtgacccctctgtccaccttgaaggagactacaatgatgcttgtcacctactacgttctcatcttcggtggccgcgaggtgatgaagaagttgcctgcgttcaagcttaacaccttgttcatgatccacaacctccttttgaccaccgttagcgctattttgctggccttgttcattgagcagcttcttcccactctctggagacacggagtcttctacactatctgtgaccagcagggtggttggactcgccctctgatcattctgtactacgtaagttgcgaagcgcttgaaccgggagaaaagaaactcacaactttgattagctcaactacatcaacaaatacgtcgagttcattgataccatcttccttgtccttaagaagaagccattgaccttcctccacacctaccaccacggtgccaccgccctcctctgctacactcagcttatcggtgtgactgccgtgcagtgggtgcctatcaccatcaacctgcttgtccatgtcgtgatgtactggtactactttcagagtgcccgtggtgttcgcatttggtggaagaagtatatcactatgctgcagatcctccagttcgtcattgacgtcggtaagtcgttgcaggcccggaacctgcaaataacagaatactgacagtttcaggcttcatttacttcgcctcgtacacctacttcacctctgcctacttcccgtggcttcccaacatgggcaagtgtgccggtgaggaattcgctgccttggctggtatcggcatcatcagctcctacttggtcctgttcatctccttctacattgccacctacaataagaccgccaagactggacgtccccgccgcaacactggccaaaaatctttgatcgacatgaggaactttgaaattccttccccggccggtaccaagagcgccaagtccactggccgctccaacggccctgtgacacgctctcgcaaggcctaaataatcaagtgaaggacgttcgtgtttgaatgttttcagtgtgattgcaagaattgtgctcaagagtttgatctttgaatcatcttaagatgagctattggatctaaagttcatccaatgcttgtggccaaacaaagcagaagtgcagaatggctgctctagggtgatgcgtccctatatttgttttaatgaatgaccactcatgatgccagattccattacacccgggcatggggtatgtgcctcggagttgtcggaacgcgtgcgccaaaacttttgtcggaaatcctacaagggaatgctgttggattaccctacccagcggtctcgccatggttgtattttataatgtcgctttctcttcttctgttcatgtttgtcgttatcactccccgtttggtggcaggccattggattatacctttcgccgttattgttattaagtattgattgatagacgttagctcaaaatatcaagataaatgtaatcatgtttgctgaaatagtgtgatagattggatagataccttggtcagataccgaatggttcgcatctccatccagatccggtctgtatctcaagagacaataaagccaaaccgcaaggttatccagctccatttgcctcgaatattgaaagccaaacaaatacccagcctgttgatatggcaacagaaaagttatatactgactctagcacaatgtgcagtatcacactgaagactgcacagaagaaacaaaaaacgcaggaacaggaaccgccaggtggagcttaaatgcgcacatcatggcctgtgcgacgaggcacagacagcgccacgaaagtgatgtatcgcatatgccccaggtaacagggcgatcattgacaatgcgtcgaatggagaaacgggcaaagccgcagcctcgagagaaaaccaaagactcggactcgaaaggcgaagagaagagtaaggcaggctacatccagcctccggggttgaaaaagcggtgccagccattgatataatgggggcgcaggttcaatagaccagcgccagagacaaagtcaaaggcgggaaactgtggatttatttgctcattgcctattctcgtcgaaaagttacgagcgccttgcttggatgtcatgcgcgtggtttattcggagactggatggagatgcggggctggattttgccgtcggagcatttatgtcaattcgaaatagaacagggaaaaaagagcttggatatgcagtggtggccgtgctgacgttagtgaagatcggcccatgaacttccgctgccctggtcggatttgaaacgctttggatatgaagacggagctatggccgaatctttttagcgtcaagacccactgggtacggggttggttggtctgcaattaagttgaagcaaatgtcaagagtttgacgtgcagaggcttgggttaaagtgtatgcataaaatagggaatatcgagtccttgctggtgcattggtgtatttttatcgtacaacatagatggggatatggtgatatgacgatgtatgatatctatgacagacgagagttaactagctgtaaggagaatatagaggaccatagctgttcagcgtcaccattccaatccttcagtgttgcgtatagcccctgagttcttgaatttaccaacgccaacctcaagccaacccccctcaaggtcagttacccctggcatcttcgcaaggataattttccgtttactcaagtccctaagtgcgtttgagttatacacatggccccactgattgcctgttcccccactatcggccattccacaactgttcaggtcgagtagttctagggaatgcttcgagggacatatgtttcatccggcccttattctcctctttgccactgtgtcgtacttccttgatacgagttctcgtcttgcataatctctcaagccctaaaaccctgatacgcagaaatgcccaatcattgaacaaacgggggattaggtgcatgtgccctaaccaatagctcatagtgatctatcagatgacttttttgatttttttcccccaaagtttcaattcagtcttccggccacgatatccagtgtaacgcgttcttccccctgctgaaacgagcgccatcccgcccttattttcccccatgcaagggtgagacaccaatcacaatccctcctcaaccctcttcaaggttcactacgcgctgaactagcaaagccagcaaaaccagcaaattcagggttattgaacctttccactttctgcacgtggatgtcgtacagggccatggcatggattaatgaccctggatgcctttccctgctactgactccgtacgccgtacgccgtatattggtttgatatatgcatcccctgcccatagctccttggtcccactccggtccacttccttaaagagcccttttgtcgccctggtggatttttggatctcctttgcagctgtgcacctggatacttgacagctattacgttccgttccttgggcctccttttcatcttggtattctctagtcgagggtctttttagtcttgcatttcccttggcttcggaacggtctgcactttggaacagatactctttcttcctttgctctatgaccgattacaaccatatcactgctgggaacatgttcggacctactccctcactgagtctacaccgcttgagcaggcatagcatccaggatcgatacgagtcagatgaggaggctgtgtcggaatccgacacaggcacccaggatctactgtcctcgcctgtgggctcacgagtcggaatcttcgattcagatctcagtgccgacgagaattctcacaatgaccctgattctgatcgggatgaacgtattctcgctccgccagcagtgaaacggccccggcccgtctcttctgctaccatcaagagaaacagcaatgccaccttcgacgaagatacgtatgtgtttgatctggaagatcagatgtttctcgaactgccaccctcagattctccgccacaactggcatccagcacttttttacagccatcgatatacgtctggcccaaaccaccccagccatctaacccaaggtctcgctctgcttcaccctcgtcggtcttttccgtagaggaagcggacatccgggttgcaaaggaggtgactataatggagccccggactcgtcctacagtggtcttgatcaaagccctaggcccacggtccaagacctcaaaatctcgtcctcattcccgctccagggaaagcagccgcagccgctctatgcttgccaggaccgatagccgccgacttacactgccacgctcgtcagacccagccaagtcaccacgagcatccgagaaaagagccaccacgaagcaggcgcccaagtcagcagaagatccccagctcgcacccagcgcaaccataaaccgcatctctgaaatcccccacctctacttcccagcaccaccacgcaccctcccagcccaagactaccgaacccgaccacgaactcaaggctccgacaaagcaatgcctccaccaccactgaacctgcacgtccaccgacccccctcaatgcgcagtacaagcagcaacagcatctccacttacacctcccgcccaacaacacccttctccgccgacggcaaacccaacaattacaactacatcgacgcaccctcaccctcccccctcaccagagcctgcagtccggcctcaatcccaccaacgccctcatcgccatacttgtccaagcgcagcgggtcctcgacatacagcgtgtcgaatatgctcacaagccgctcgcctctgatgatgcgtcgcatgacgaggaaacactccgcctccagcgtttactcgctaagcagtctgcgctccgaggtcggcgttaacggtccctcttcctcgcagatctctgtcgcaacacaacccaccccgcctcccactgctgacagccatgtcgtgcgcaagtccagtcagcgtcgccatgcgcggcataatagtgtcctgccgagtgggaggggctttatgggattgaagctgggaaagaagtcgcataaggcttagagatgggggtcttggctttttgatttttgcttttttgctttctggtacttaacatatattgatctggtaatgtctttatgggggatctggcgtatggcttggatttctaggggtttgttccggtgttgtttgatattgggcgtttttttaactggtttctttcggtggtcgcttgattttttctgtcttttccctctcatctctgtttttgatcggctaagctaatgtatgacggcccttgacttaggaaagggcagaatcaagtattattctgggatggctaatgtcttcaattttggcgcatggtatgcgatttagagataactattgggtggtttagttacatagctaaatagatagggagacttctatcagatgcagtctgatattggagtctacccatacaccctgaacacaatgatcgtgttccacccaagctcctagtataggtatcttatatcctcggaaccgcgtatcctcagcttatatactctaggatgtggagaaagatggtctttaatctccttgcaagcatacacatggagacagacttctggcctcccatcatttccgtaaaatgcaagcgataccatgcgtttgagggaaatcacatgtcttgccagcgtacaggaagcttagcaaggggtactgtaccctttttttggcagcatagatccggaaatcggcttaacaagctggatgtagatgaattcgataagtgcgaatattgccaacttcacctcgagttggggatgtgctacaacatatgctactactccgcactctgcacaataagaatcgaggagagtaatcgaggatttagtgttgatgtgacccactcccccaatcgatccgagaccggaggattttatgtccgctacgttgtacaattgtccgctagggattcggccgagagtccgttaaggcaagatttggccgtaaacaaggagcaagtggattttagtgggagcctgcttctgcgcctctagggcggctttgatggttgttcaaaaaacgaattagcactattccagggatagtaagcggcacaaaacctcctcccacgatgaacagtctaccaatgccgaccagctaagagtagagtattgaaggtctgtgcacgcgagattcggagaagatccattgcaaaggaggtcacgccacgagccgtaagtgcctcgacgagggacttgttccggaggggctagataaaataaataacggtcgagactttgcgtaaagatgtccatattaatatatcgactcttcttctctggctatgggtccgagtctgagttcgacctccatctcaaacctctccttgccgtatggttcgtttcgtagcgtcgctatttggtctgtcccaaggggaaagtccgactcgaatatcggctcctctgcccctcgcatattagcgagcacgctttgccggaagtgccatcgatacgatacgtacatcggggtaaatagaaaacgcatactgatcaaaacaattgtgtagattcgaagtcatcagtaaaccgttttgaatagagttaatcttcgaaaccctggcatatggtgcatatttgttatctaacgcccgaagttatactcaacccatagaccctccttctctagggggaatatatgggcagcttcgaagccagtccaccaatccgactgcgcaagaaggttgatcgtgccggaaataacgcatctcccgtctctccggccgacctcagtgcgaaatgactcttcttgacctgaatgattaaagccacagacgtgaggaaaccacgcttcgtctgctcacagtttgacaaggaactcttacagtaacgaaaataaccgtatgctatacgtgaagtcttgacatcacaagaaatgtcatagtcgccaggacaacgcaattaattattcgatggtgtgataattcgaccggatgctcgatcctttatcgtgaggatctccgccgcaactagcaacacgttctcgagaatccagatcagattagcgtccgttacggaaccagcttaaaaggaacctcctaggagctgtccgttagacgcatcgtagaaatggacattgcgcaacatgctcctgactgacgacatggtgagtgtttaacagatgcagatctcctaagggattgacatagtgatgaaggaatcgatgagggcgaacttgatgtatgaggtaggtatgcgataaggcaacgatatcaacacgtgacactaagcccagaataagacgttgattcttcttggaggttacgaaaggaaagatgttggtgtaatgctgttgtatggggcacgtgcttgatcacgtgctcgtatgaacagggatcttgatgcctgaatgcctgaatttccagatttgtagttagttatgggatcaaaagcttcattttatgcaggggaccgcttacattgttacaatagatgtttctcgaggagttttcttgggtaattttttggtagtcttttgaaaatataacaattttaaatagctataaatagctgaagcattatatagtctaagcccgaaagctctctactgcaatctctaaggcattatgtgcccggtaataggaactggtggccaattacaattcgtactccacatcattgaccaccactcgtttcaccatggtcagtagagccaacttcatccacggtcgcctggacagcgcccttactatcaataaagtgagtgatgcggtctcgaggaagccaagcactctctggcatcatgaagtaggagatcaatgcgaagatggtgactccagccatgataatgggggcgtctatcaagcaacttagttagcgcgataaaaccttataagaaagaacatcttacaattcagattctcgccagtgactgggaacacgtagggcgagaacaggacagcgacaacccagccgttccagaagacaccaatgaactggaacggcttactccagcggccgagactccactgtggcttcgggaaccgcgacggagtgcagaatagtcgacccagacagatcagaccgtaggcggcagcgctggggacaccggctgccgagacaagggaagtgaaagccgtggcggatggaagaatggtgcaactgactagggcggcgacaacccagacaacaataactgcgttccgtggctgaccgtcctttacacgagagacccagccggagaatgggagtacaccatcacgggcgacggcgaagacaaggcgagaggcggcgatgatggcaattgcggtgttctgagaatgaaagtcagttgtgagatatgagatacccgtgcacaaaatgatagctcaccagccacaaagcgaaaatgcaaatgatgttcatgaagatatggccgcccttgcctagaacaacagcgtaaagaggcacaaagggttggggcccaccgaaacccatgagtgtgtcggcgtcgggctatagaaaaacaaggtcagaatttcgaatttcggcgttcgcaaagacgacgggagacgaacagcgcagaacaaaaagagaataatcgtagccaaaccaccgaacccactggcaacggtactccagaaaataccacgcgcagcagtgatcgacgcattcttggtttcttccgcaacgtgacccgaggcatcaaacccaatcagaatgccagcggtagcaagataagaaagacaccagttccagccagccggggctccggtaccgttgtacgtggtcatgaaggcctcgtgggtggtacggaatccccaggtttgagcggtgccaatgggcagccagacaatgttcaggataaagtcgagcatcacgactgcggaagaccaccaaaagacatatttgaaatagcgagctagaatgctgtcagaggtgatgaatcaaagttacgcgtttgtacatacgaggcaaaaagttcaacagggcggccagagcaagcaagatctcagtgcagatccactggactgcgcggaacttcacgctgcttgagtctgatgggaaatcgaggttgaatacggttatttcctaaacgcaatgtatcagtctgaatcccgggaaaccaagaaagaaaaaaagcataccgcaagcatgtaattcgccgcagcctgggtgttgcctataatcaaattagcaccatgtaatccttgtcttaaggtagatacgcaacatacttgcacagaaagtcgtccaagccgttgtactccaccaggcgacgataaagccaagcagtcggccaaatcgaggcccaccagcttcggcggcccacaagtagattgacccggcagacggagaagccgaacagacctcggcgatgacagcagcagtaatgaacgtgaataccatggttactaggtaactagtccaataggccaggtttccaccggcggcaataccagtgctgaaagtaacgcggacaccgccaacaaagtacagagcagctagatagagtcagtataaatgcacccacaaagtagtgacagcgaaaaacgtaccgaacgtggttgaaaaattctcgaacaaagtgtatgtccgatgaagaacctgtttagtgaattagttgctgaccacgagacatcttaaatctacgattcgacgtactggcttatagcccatagtttcctagaagatttcatgttagtttgatgtttacaaaacaaggcctggatacacctaccaataaagcggtatcatcctgtttcttgagctcagcccggtcaccttcaccttcatgggtgaggaggtcggcggaaccggcgacagggtcgtgggaagccatatctgaatgacagatatatagggaaaagaaagaacccaggtgtctgtattttctggattgagaagagatcagaaattttgaggatagactttccaaggttcgtgttcgtcctgcggtcaaaacgttcgcaaatgctccaccggaaatattaggagacgccacagccttaagtggatttgatttgatgactacagatgacctagttgggtaactggttaagttatgagtacagtaatttatcaagtgtattatatatattattatatgcctgtcttgatcttccttgaagattattcaattgccgcgcatcgcgtaagatcaaaattttttggattaagtttcaaagagggtccaatataaccttggaagctcggagctttctgatccgtcgagcttgacttgtttattaggtagtatataatcttgggggtttaatagagaagatagatttgtaaaggctatcagttgttataattattcccgtacacagccgcttccgttacacggactagaaggccgtttttggtaattcttagcctcgtgggagatgtttcacccctgagctaagactactagcttgccttgttaaatggcgatatattgtgtacctatttgtcaaatactgtcgttataccaggttatggtgccacacagctcgtggtcataccattcgcaccggggtgaaaatgaatagcaggtaagctcccatctaaggggatatgtattatcgcttttgataataattcaggggttttttgctcgattaagattcgtaaatccaatgcccctcatagcaaatctgataggccgatggcatcatatcatcaacggaacgaacaatacagccttatatcgacgcataagaacggtccgctaatatccactgatctcttagcagattgtgaatatccgcagtgcaatggaccctaggatcctcaacagattccattcctattaccacaacttaacaatctgggaaagaggcggcaaggagacatttaaggtatggacgaccggtacgggaactgggcgttattcctcctaagcaaaggtcctctcgtcctgctggctttggcattgtttggagacacgtcttttatcaatggcatcgtcaatggtcgctctctcgattctcattgcggttcatctttttgttcttttcttccatactgtttgggtgccatggctgttccttctaaggttggactggatccctcatgctagctatggtgatggcggcacactaagatttctgtctacaaggaactggttgagaaggaggaattaatcgacatatttacagggtctgtgggcgacacggaggctgatgcccttgtcgggagacttgcagttggagctgatgctccgttaagacgggaaattttacgcgctatgcttttgaaacaacagagtacccagatgaggagagaaggaagcaaactatacaaaccaccgacctccattgctatgcgaacgcacaaagaaagaagcaaacaaagaaacaatctcaatatgacatgtgatagcatgtgacaatgcaattcatgacagaaagtcaggtattggaaggctaggagcaataacaacaataagagacaacaacaagagacagcgacaagacacaacaaagtagacactgaaatgaaaagggaggaaccttctaccctcagattattgtttcatcattgggaacagagatttatccctgtaggaaggagatgagaacagagccccttttgttaagctcctaatggacaatggagaactcagagaagtacagtctgtatccgcagtggtcagagggagagtgcttctaccgtaacatgcttcgtgccattagaccaggaccgaagccccaacctagtttcagccttcaacgagccgcagcaaagttccaatcagaatcctcaggatttcccttcactggacagcagcagacgtatgttgaatacgaatctggagctggcaaaagttcaaaaaattaaaagggtactcaacaggaacacgatgtgcaatgtgggcccggagtgttggagaagagagaaagaagaagagggagaggggggagggggcaggtatttataccctcccagtagcttaaggtaaatgggaaactggggttggtgacggtttttgaccaaaagggaaggcacctgatcggggacaagatagcacgtgtgaagagtcatggaccactatctgctcctctatcaccctcgcattacgaactgcaacctacatgtaccccctaaagctcgtacatcggatgatcaagggtttttcacttaattcatgccatgcgccatggtgatgctagaggctatgatcatgaggattatattatcattttcctggtctatatatacatgctgcttcatatatatgctatgatgcaggggggctaccagactaagtctttagctataaaagagtcaagttgaactcatggggtatcaaaggaaaagagaggcaatatatgcatgatgacatgtcgtgaagtcgcagagagatgtcgactccagccagcttcacatcagggaagaagaatattcgtctgaacttcctctaaggtctggatccaacctccaggaaaggagcgtctcttgagccagactccttctagggtctcgagtgctttgtcgacgttctagattatgagatattagcattcggacccgcctcttgatgaagttcatttgcgacataccctgaaaccaaaccgtttcaactcctgcatagtttggcgaacaaatttctgctcgggctcactccgagtctcctgtccggcaatgaaaagcggccacagaaaagccaattggcccacatctttcggcaacttctgagctagtagaagaatccgactaacaagcatgtccatatacgtccactcagtgatccaaccgacacgcccagctccagcgatctgaagtagatgaacgaatgtcgccttctcgtatgcttcaatgcaacccgcatactcaagaacgtcaggatacggatacagagaaaggctctcatcatccagctcggcgggcagctgtaggcagggcggggtcgtaacacgccatacaaccagctggttgaagatgtctttatacttcgcatccgactggtcggttgtcatccacgttttcttgtctgatgcaaatgtactgatagctgcttgcacctccattaggctggaccatgcctgccgcagctcaaccaggcgtgggttgtccgggatcgttgacaatagacttggcgtcccgagattgtattcccaccctccacccatggtattccagtaattaccctcgaccacagtcccgccgggagtcgcgcatgaacctgccacatcgagatatgagagtagggagacgaggaatgggcggagggggtggttcgtctcggcgacgcgttgtacttcacgtgccgagtcgccgggttgcggatagaagaggaggttgtagatttcgcgagctcctttgagatgtactgcccagttgttgtgttgggaatccatcatctgcaggaatattagtcaattgatcatggctagcagatctagaggggaaacgaacctcgaatagggaaagtaataggcacgtcgcgaaatccgttaatccaagctgctggctggggtctgagtatcgtgcacgaaaacccttcactaccacgccgtatttgcccattgcctgctggaaatgcctattccgctgcgatcccaccgatgtgttcgcaagatgtaatgcgcctaatgcctgcatcgcattggccatggttggagacgaccgcgcgaaatccgggaaatgtgtgcggtagggattggcattgtgaggggtgttgtagatgatcaagaatgttgatacctgatccgcaaaataagtgagataacgctcttcaatgcgctggatcgatttcgcgatactgatcgaggtaacaggatgctggaagcggaacttcgttgggtgtggcagcgttgtgggggcgaccatagccttgcagaccgcattgccaacatcttccctctcctctaagggggagactgcaggagcgtcgcttgactctgggctggaggtcgaatcgttgttctgcgtcttcggtgccctggatgactctggcggtggatccgtcggtgtctgagagggcccgtagaccttgaacgtcatccgcccttgagcgccatcgcactcgtgtccaagacggacacagttattacaggccggagatgcctcgtcgcaacgaacatggcggcggcgacaggtggaacagcctgtaaatcctcggtgatgccatcggcggactcgttttgggggttcggtcggtggtgtatgtgacgtgtccgacaacggtgcaccctccctgcgtgtctccatcgggcgcgaaactcgaaagtaggatattgttcagacatggacacttagaatgaaggcgaatcgacatgaatcatgatggatgttataaggagaatccaaccttggaagtatctgggtttggaggggcgctgaacggcaaaacgcatcagctcttggccaatggcttttcatttttctatattagaatgtttcaaccaagcacatttatacccggttttcttggcccttaaaagctcttggctcgactctagcgtcaaggcatgtgcaggagctgaacatagcgctgtgctattctagttggctgttttgaagatactacagaatcaaagtggaactcgaaggattcatctagctccaatctagaccaatacataacgtaaccagctattgaggaatcccatcctttaaggggctgtttgtgtatgttaaccattactggttactccgtagaggcatcgaacttgagagtcagtttcaaatctaattgagaatacagactcacttacaatgcactgttcaaagggcacgctggagttcagaatggcccccatggccgcccgggcaatcgtcagtggtaccccgatatgcactgcctgctgctctgcctgttggagaacggcctcattgcgcgagggaacgttcacagaagcccgggtggatttgaaacgagttgcctcacggacgtatgcggctctataagagttaatgtgttaatgtcaatgtcgtaaataaacatttcaagtcctgctcagggacggaggtcggagtacaaaccgccgatttaggagctgaagtatttgatcgtcgatatcatctagcgcggttcggatctcatccaaagtgttacagcacgtagttaacgtgccatttaatgacgaaaaatggacgctcggagtgccccatggcaccgggcgatggtctgctgaaggtgctgaaatcacattggaaccatagcagttcgcattggcattggcattggcattggctgttgaaccaatagcagtggaaagggttagaaaccccaaaagtacctggaaaatcatgataacaagttgttgtaaagaactttcagggtaataataacaataatggcaacccctcgttgatcgcctgccctaaggggttatgatcatcatgggatgttcatcaatacgatatttcaccaaagatatacttcgccaaccaatgcggggaaggtaacggatttcactccgagcttcgtgccgaaacccctcttcggatgtttggaacttatttaaaagctcttgcttctttattctgacttctactgtcaattctcttacaccaagatgtcccaaggttcaagactccaaggcaaggttgccatcgtcaccggtaagactgttattccaaaccactccgttgcggatgctaatattctcttttcaggaggaggtaatggattcggtgcagctatcgctcgacgattcggcgaagagggtgccaaagtgatcgttaccgatatcaacgttgagggcggcgagaaagtcgcctcgcagaatccttccaacctcatctttcagcgccaagatgtcacacaagaagcggactggaatatggtgttggatttggcattctccaagttcgggcgagtggatgtgttggtgaacaatgcgggcactagctatcgcaacaaggtgggttcaacatattgtatgaggggacctcgctaatttcctttagccgacagcagaggtcacagaggaagagtgggagcgtgtgtttaaagtcaacgtgaagagcatttatctttctacaaaggccctgatgccgcgtttcatcgagcaaggccagggtgggtcggtgatcaacatctcctccacgggagcaagtcgaccacggcctggattggtttggtataatgccaccaagggggcagtcactaatgtgagtgaatgttgggactgtgaatgaaaatgattattgaatcactaacaatccatacaggcgacgaaaggtcttgccgcggagtacggtccccacaatatccgattcaacactgtcgctcctcttctttctggtactggactgttttcgatgttcactggtatggaagatacccctgagaaccgagagaagttcatcggaaatgtgccattgggccgactcaccgatgtggatgatatcgccaacatgtgcctgtacctggccagtgacgaggctcgttttatcaacggcactgagatggtagtggatggtggaaagtgtgtttagatatccgagaccagacgaatcaaagtcacaaattaatttctctatcccgatttaccccgcagaaacgtggggtatcacgccatggctcattctatctcctggctacataactcacctctccactatcgccactgatgtgagcccaaaaatgacatccaacttcaaatcaatcccactcatcgacctatccctcgccaactcgcccttaacccgacctaagcttctccaagaactccaccacgccctcacgtgcattgggtttctgtatatcacgaatcacgatgttccacaagacgtaatttcagacctgaaagatgctctccctaaactttttgccctcgatccggcggtaaaggaagaagtggctttacacaactcccctcactttttgggatacagccaagtaggctcagaaacaacagccggagtcgcagataaacgtgaacagttcgagtttgcaaccgagctgccagacctatggcgtgcgggtcttcctctttatgaaaggttgaaaggacccaaccaggtacatcaacctctactcagcccatcagtcatctggctcaaaagttatactgataaaaagtaacagtggccgtcacaagacctctctcttcggagcgtcatcgagagatatatttacgaattaacaaacctcagcgagcgtttcttacgcttggtcgccgaggcactctccctggactccaagactctattctcattactctcagaacagcaccgtctcaagctagttcattatcccgcctcagatcctgtttccgattctaatatccaaggcgtgggtcctcacaaagattcctctgggtggtggacgtttcttctccaagcatcgcccccaaccgtgaagggcttacaggctctcaacaagagaggtgaatggatagacgttcctgttattgaaaatacattcgttgtgaatatagggcaagctttcgaggtggttactcacggtgtgtgtaaggcgacgacgcatcgtgtgttgtcaggtccgtcggagaggtatagtgtgccctttttccagggtgttcgggggagtctgacaaaggaggaggcggttggaactctaagggatcattttgctgtgcaaaatatggcgttggaggcatccgagggtgcgagtgttgactcggcctttttgaggggcaggtatgatacttggggggagtcgcaattgaggacaaagattcggagtcatcgtgatgtagggcgtgtcttttatgcagatgtttttcatgattatgtcaatgacgatagctgagatcaaagattgagtgagaaagtcggccagctggtgagcggacggttcaccatatatattgcaatatgcaatattgtcaaacagaaaaatgagtgatcgcgttaaagtaacactcccacatcgggatattccaacttcatgataggaggttagatcatatttggatccattcaattactacttgggttgactagcacttgctctcaagtgctcccaactgctgtaaatatgtacaaattgctaatcgcaacacccaaaccagaaggatccacctaaatatataaatcatatgacgcgcaatttgaatcaatcagcagaaaatctggagccaaatctctcactcgtggtcactcgagggctcgattttagaatctccccgttcaatagtcaacaccgttggaatagcaaccaacaggctaccggcagttagaccccagttcatggcaaactgagtcatggcactgactccctcggcgtttatcctccaggccatcgcaccgcctgctggcttcaatgccgaataggctccgacaatgacagcatttactacagggtcgcgggagcgagcccccataatccagtagcagaatgattgccaaaatgaatcataggcgccataaaagaaatagagaaacattggtccgaggtattcacttcctgctttgtaatcgatatcctgcttcagaccttgtcgtaaacgctgggtatcccagacttggaaacggtagcctccgccccagatcgccatcccggtgacgaatagtatagaccagccaatcttggctcgcgtgcgacgattgacaatttggaggtctagcatgaaacccatcagaagcccgcctgccatttgtgcgatccagtagagggctccattgagagcgcgtgtgcgtaggttgaatgtcatgccattgacagcgttctgttgataggaatagaaaacgtttgcagtgtagaacatgggatagaggcacatgttcttccagttgaagactgtacgcagtgtctccatcacagttcttttgaggttcgtccagttgacagccttggactcttgagtgatgcgattgccgtggtagtgtccagaaagattttcggttgagcagacaaacaccgataaaagccatccaaagagcatgacaacaatgtaggctacatatgtcgagtctgtcaccgtcccggattttgagttgtagttgagaccaaaactggccagcgagccaatggttgcaccgaggttgaatatcacccaaaataccccgatggctctgccgcgcgtgttatcgttggtataagtgaccatgatggttccttgcgcaacccaaaaaaaggccgcccccaaaccaagaatcgcgccggctgcaatcacgaaagggccgccattcttcctcctgtcggaattcaacagtgatccggcatagagggcataggtccatccgccgatgaggaggcatacacgtggcccgaggtacttgtaaaaggagcccgccaaaagcagtgctgctcccgctgtgcatgcatgagttgcgacgttggcgttggcggagattgtgctgtcgacttggccagagcctcccatgccggtgagtgcattatacattccaggattgcaaaaggaaatcactgaaacaaggccgatctggaaccaaggttcatgatagatcctagtgacaaagtttttgtgcactcgtgggtaaatgacttcggggtcatcgttgtgcggagaaacactatcttctaccgacttggtggccatgatgggataggtagactcgagatagatatattgggactgaacatgtcaagcgctgggcattttctagataagtatatatagacatagaggatgtgaccctaatctgttccagactttgaactatggtgtgctgggcccgcaatttggaacaagcggatctcgcgcaccgagatccgttcttcacggaagcgaccgagatacggagacacagttagacggcattgatttgattttctacataagagcgtcgcttcaaatctcggttgcgtgacccgaaaacttttgctcacgccatgacgccatcagattgcgaacaattggaccaccttcagaccgaggtgcgcagtgcctatgcacactcaatcgattctcttgatactttagacctctgtaccgccttcaatcatgaggagtcacgagtatcttcctcagtcgcgtgctgtctaccggcagttgcatcctttgttgacgaattagtgcctcggttgcgcgccggtggaagattgatctacgtgggagctggcaacagcggccgagtagcgatgatggactgtgctgagatcccggtcaccttttcaaccgatgagggccaatttatcgctctcgtagcagggggtgaacaaacagctaccaaagcgcaagaaggagcggaagatgccgaggaagacggaaccgcgcaactccaagccttgaatcttactgtcaaagacgttgttctcggtatttcggcatctggtcgcacaccatttgttctcggggctctcaaattcgcgcttcaaaccgggacactgacggcaagcattacgaacacgtcgccgtccgcgattgatagcctcggggtcgattatccactagttgccttgctaggcccggaattcattgcagggagtactcggctcaaggctggaagtgcagccaaacaaattttgaacatgatcagtacttgttcaatgatgaagcttgggaagacatatggaggtcttatggttgaccttcgagtcggaaaccacaagcttcaagcccgaggtcgaagaatcgtacgtcaggtctgcaaagagactatggtactccattcgacaagaggactcgttcttccaaccgagattctaaagaacttccatcaaatacagaacgatgacgcagcaaacaccctgattgccagatgcgatgggagcgtgaaacttgcctgcgccgtggctgttacggatctttccccgagtgaagcaaatacacaactacaaagcgtcgatggcgatttgaaggcttttgttgcaaagcacctaaactcgacttacatccacggaaataatgcctcagttgaagtcgatggtgatgatccggaatattttctatgcatcgatggtggaggaaccaaatgcgctgtatcaattgccactaaatcaggtgttgtctctcgtggctatgccggcccctgcaacttcaataccgtggctacagaggagctcgtaggccaggccaaaaaagccacgatggaagctgtgaggcttttaccgcggaggcgacattcctatctcaccaattacccccgattcagcaaagtatgggccggaattgcaggcatacaccatgccgagaagttgaacgtactcatcaatcgtcttgaaagggcgtttggcgtttcgatggagagcggtacgctccgattgacaagtgacggtgcactccttggcgcgtgcatcgagggcgatgcctctgttaaaacaggcatcagtctcatatcaggcacaggctccgtagccactgctttcagaaaggactccgacggccatgtcgtcgaagttcgtcggacaggcgggtggggccatcttatcggagacgatggaagcgctttttatattggcaaaaaggctttgcaagccctgctgacaagcatcgattccagcgaagctgacgagagctgcttgagtgaaatggagggggaagtcctggcccatttcggctgcaccaaaaatgccgtgctatctcgcctcctttattctggaaaaaatccgaagagcgacatcagccatcttgcaaagattgtgacaaggctggcttttcgtgacaaagaccctaatctccaggctcttgaaattctcaattctgcagccagctcgctagctcaactcattcagccgctgactgttacctgccctccagccagaagcgtgttgatcctttctggagcactaatgggcgtgtcgaaattcagagtattgctgcatgaacagctttccttggctcatgttgctgcttttaaggaagtaatttccatagagagtgcatctgattctgctgtggagcttttggctgcacaagcggcctagccctttcatagaatcttttaaaattaaccttaatagtagaaaaacaaacttgctctctgtgtttttctctgttcaatttactcttggtgttcggcctggcaaatgctttaataaggcctatttgtttagaaatgattgacctccaagacctcgatgtaacgacctctggcatttccggctacataaagattacattctgaaaatatatctaatgctggcgtggatacaaaggtaacccatgggtacgtagaagcccctccatggaatcactcagctcaacaacctctaaagttctttcacggacaatcaacgttcggagtccaacttagctgagggatgacgtaccccaataggtgcgttgggggcctccgcacgttttttgagatcggccagaaggatggaggcatggctcaagaagaggatggaggcgttcgccaaagtgaacttcattattacggttctagggtatgagtagaaaggaatgtcctagttgcactgttaatgctaagatgagatctgagtgcttgttattcgaagctttgggccgaaggctgtcttataattattgacggagtcacaaaggtcgagtgaaaattcagtcacggacttatagaatatggccgtcggggcgtcgatcatcttacggagaaagctgattatatcgtactagggctagggccaaggttaattatgatgctatgattcctttttttggcggctgtgtatgagtgcagtgccctgtagatggtcttgcatataaagcttgaccactctcaacttcgtaccctgcccatttacatctttcgtttgtacacacaaggctatgattctattagatgcgtcagccgtgagagtgagaaaatctctgtcaattctagtggatatcagggtccaaccccgtttgagggtcatcttgacgcttgaattactgagtagcaccgttttctacaccgctatatacagtgtaatgtaaataactcatgggatcactcatgggtgaattcatttgcaaatacttcatgatgtttacattggctacattatacagctgtatatagggagtagtaatggattagctagggcccaccgccgaaccgggtgcgggcgggcccgcgaggccgcaaagcgcagatcttccaaaggtttcttaattccttgatcccatttgaatcctgggcttgtaagccatccaaaaatatggagacacctaggctgcgccaaaccccaacacaactcagcccactattgggttgtgctttagccgttagtgggtttcgggaagtcgtgtgattctttggagttctgctgcctggttgtcactcttcgaagtttccgatattgcgactactccgcactttcttccctcaaacataactcaaccataatcatccgcaacaacaacagacctaaaaatcattatttcaagagccctcacgctctgtcatcatgaacaccaccattcgagaagagaattgcaaatcagtcgatcttgacggctttggctccaccgccgacgacgcttggttcgattaccacactgcacctatggacggcgaggaagagactggggcgcatccccatcaagttgcggctttcaaagcgtacatgaaaggcgactccacaccatccgagacagctgccatcatgaccaagcctcatgatcccgacgagaggactgacatacaacgccgacatacaacgccgcgtactgggcataatcgaagacgcgctttttcagctgcccttaagccacacgcccgccctcatcgacttgataaaggaaattatcaaggacggtgatccatcctgactccaggacttcggcaactcgtggtcagatgaatggaagcagagccactggcgcggcgcattgacgaatcggaatccagccacgagagggaagaggcgcgaggcccacgtgcacctggcctttgtggaggcctcttgtataatggctgctccgggtccgcgtactgaagatggcatattgcacatcgtgaaacagtcgctgctgaacagctgacaagctagaatatatattgcgagatttctcatttcccaacccatgcctcccgagtagcctaccccgtatagtagaataacgaattctaagcatatagggagcagtggaaataaagacctcgggaaagttgctgatatcgcttatcgtagataacaccatcctatgctaatcttgcgtcacacctaagctgttgcacccgttgagaattatttgattgactctgcctttactttttatctacatggcgtctgcgtcatatggcccgaacgctgaacaagtcgcagcaagctgtcaaacgtgccgcaagcgaaaagttcgttacttttattagtctctttggtggattctaacagactcgaataggtaaaatgtgaccgcacgccggggagatgccaaagatgccatcgatttggtgcagaatgtgtttaccagtctgattcgatatcttctcatgcgtcgcacgtgacgcacccagccgacgccaggacgcaggctggactacagcggaaacgtgcttggcgctcctgcattcaatgcaaacgagctaaggcaaagtgctccgggggcactggctgtgttcgctgtactcggaaagccttggagtgctcttatgaaatggatggtattcctcgaaatctatccagtctcgaggcaaggtcgcatgcagtccccgcctggctcatgacagccgacttgccgtcaggtgaaggattgaaccagctcgttgaagtatattttgagcgtatccacactgtgcgatgtctaggattcctacacatcccaacgtttatggagaagttgaagagctctgacaaaatatataccgaggaatccgggcttcttcatgtcatgtgtgccttggccgcgccgtttctctacggcgatatctgcagtcacggtgatgacgttgtcgatcgcgaattgagattttacgaggcagggaaaggttgggcagatactgcactgcagtattcattccgaaacctaggaacccacaaactggaatgcttggcgacagaggttctgcttcacgaatactatttacgtactggagaatatgcgaaagcattggtggtttctgggcaaattgccaggcacttgcagctccttcagctgaacgtggaatatgaccccgaagctcatcggaaagcacgattgtctactcccgtcaaggaaagcaggaggaggcttatgtgggcttgctatctgctcgatgctttcattgagtgtggcatcgatcaacttcgcctaatctcggcggaggatatccatgtccagctgccatgccctgaggatttgtttattagaggtacgccttgcgttacggaaacgctccactcccgcgaagtacctcctggcatgcatacgcatttcgatattcccgacatgcgagcattatatatccgtgcaatcaggcttcgtgcaaagattcttaagtacgtgaaagagttagaagatgaagtaccctgggagtccgacaatcggtcgcggttctctcttctcaatacggagcttcagaatcttgaagcctccattccagatgcattgaaaatgactaccgcgaacaagtatctgtataaagcatcagggcgactcaatctctttttcggtcttcacattgtactctctcaaacatccaatgatttatatcggatctgtgtctcacagctggtattccccgatacctcgaccaaatggatccgagagcatgcaccaaaatcttttctcgaacggtgtcaccgcatgtgcttggagaaagcagtatatattgcgaccctcttgaaggatttatggctgtgtcacaagcccagtctcattgatacattgtatgcaaaccatgttcaaatttgcagcagtgttttagtgactactcttctctcatggggtgacaccgcgcctttgcttccccaatttgactataagagttatcgcacaatgctgcaagataatctcacaatcctgcagtacctgcaaaagtacctcaatgtagatgcatactgtcagtctgcaaaagaagccctgaaacggtttaaccagcttttcccggcagaagctccatcacaaatccatcgtccattaaaggatggcatgatcaatgaccaagtggtgacacactcgcagtcctcccttgagtacattctgaaccctttgggaacatatcctttagctcggaagcagacacaagatcagcctacattcaataacaccgagaagggagaagccatagtgggcgaagcgctcaatatgatgcctgaacaaccggtcacaattggtgatgacaatgttgatagtttggatgaatcggtctctcctagtccttttgaatgggggtcggagactctgatgtttgattccgcaggatatcccactttcttagaccagcttacgggatggggctctacgaacttggaatggaatgaatggggaaattaaagatggtgtcttcgtctttttttgtttaatcaagcagtatgttagagtgaatataccctggcgttggaaacgtcctttttttatatgttctgaatagattatatcttcatctgcttaaacgacgaaattccctagatgccgatttcaaattccgttgatatcgcttcacgctcgtgataatggcgaatgatgaggtgacaagagatagacctcctgattggagcggcgagatccgtatactgaccggatctcggtcaagccccataataaatccgacaatgccattgagcttggcataaaacgaagtataaaatgcgatggtatgtgagatatgaatgaagcactcgaccaatccttccttgatcaaagataaatcgacattggaattcctgggttactttctcattccatctcctacaaacatgaagactctttttcaacacacagtgggcttagcgcttgcttgttcaacttacgcttcatccttccatgtgttcgacaacacagcctacgtgaacacgtcaattggctacggaacaaccaatatcaactggattcccgcatacgtgtgcaacccgctcaccgaggggggagttttaccatcagccgatgtatggaaagacattgtccttgagtggaatatctatccaagttacccactggttctcgactgcgaagacctctatttcaccgatgcttccacggcagatcttcacttggagctcatgtctactctgcaaacctgggcggccgatgtgattccctcgggtcagattattggctggtacgggctatccggaaacacaatttcttcactgtatgatcactatcgaagcctgatcgcaaatcataccagccatgcgtttttcccgtctgcctacacattcagtgacagcctttccacctggaatgcgtcgttgacgtctgttctcaagaccatcaacgctatcgatgattctttgcccgtttggccatacacttggccgcagtaccatggcaactattctttcattccctcgacgctctgggaggatgaattgaatgccttggcaaagaatagtaatgtggatggtttcgttatctggggtgggaaaaaccatgccgtgtgcaatgatgcttgccagagcactgcgggccaacagccttggttgaatgccactcgcacctatttgaatactttgtatggcatttatagtggcgacgcggaagttgaagggtcccagatttttggtggaatatagcctcgctttactttcgttgagtcgtatggcattcactgccgctgtctattcacattttgactgttttggccttggactcttgtataatactaccacagctatgaagcatctctttctgtgacttgttctttttgcaacgaatcaattcaaggtagagggttatgtgagttgagtacttgaaaatatcgcaatcaccaaggcatatattccaaattctctagagaaaatcgataagctaataggaaaactgtatagcatactattgttgagatatgaagttttagcatgtgaaatactttacgcgaagatttggctcaatagatcattttcctatatatagtctaaaagtgaggcatctcatatgaactgcccgggtggtctagtggtatgattcgcgcttagggttaacccaaagcattaatgcgcgaggtccccggttcgatcccgggctcgggcccattcttttttcttcttcttctttttaaattgaaggaatctaatatggaaatgctaaaagcgtcatgcgaaatgtcattttgattagatggcaagaatatgtgagggccgcaaaagttctgcagatcggccgatagaacgtacttgcccatattaaccacacccttgttttttttcgctaatttaggttgaagaacaataagtatacatagatcccgcacaaatatcctaaaatccgaaatcaatacaaaagagaagaggtaaaaaaaaaaaaacagggctcgggcccacttatcttttttttgtttttttgctcttcttacattttttacatttgatcattttgaatatattcagcagcatactgtcaacctctttttcattcttacattcttcccgctgaatcaaaggtctcctggacttccggttgggcttcgtcgaattgaacggccggaatgatagcaaaaggagcatgcgctccaatttgtcagttgttttcggcgcgcctatatctaagggctaacctggaccatcgagcgagctttatggtacggtgactgtgttggtaactctcaattcgaggccacagcactcttaaggcggctattccgtcactgttgaatggtaaatggaggaacaagatgaggcagagacatgcgatttctttgtatggcttatcatctattgtctaaaaccgtctaacctcgacagcaggcttattcccaacagcaatctcaatcttctcaataacctcatcggtcaacttctccaccacctccaaagctcgaatattctcaaggacctgctgcggcctcgacgcacccgtaatcatagacgagatattcggattcttcaaaacccacgcaagcgccagttgcgccgttgtaaccccaagttcctccgcaatgggcttcaatgccgcaacctgatccagctgacgctgccaggtatcatcaccaacagttttccggagaccctgcacgtatttatcctccgattctgccagccgcgacccagccggaggagcagcaacatcgttatacttgcccgtcaagacaccgcccttcaacggcgaccacaccgtcagaccgagcccgtgcgcctcgtacagccagcggtactctttctccacacgctcgcgcacgaggagattatactgcggctgctcgacgacagggccgacaaggccgagtctgtcggcgatgcgccaggcgtccgcgatctcactcgcagtccactccgacgtgccccagtagaaggcctttccgttgtcaatgaggtagttgaagccgcggacgatctcttccatgggcgtgtcgcggtctgcgcggtgtgcgtacaccacatctacgtatggcaggtctagccgctgcagcgagtggttcatgccctcgatgatgtgcttgcgggagagcccgttgttgttgagtggtttgtctgggttggcgctgttggctcggccccagtagatctgaagatgggttagtgggacaggaaaactggatgggaaattgcgcttcctaccttggtggaaatgacgagatcgttttgcttccagccgaatttcttgatcgcttctccgagcacgatctcggactttccgccggagtatacttcggcggtatcgaagaaattgacgccggcgtcgtaggcgaccttcatgcattccagggcggtttctatttcctgttaattttggtctattctatcgatcggaatggtcgtaccattcccgacgtgtccgccatatgtgagccagcttcccagcgagataaccgagactttcagtccagtcctaccgagggaccggtattgcatttcaggaagagcatcagacatttttagtttggtgagatcaaggtaaattcagggggcaatttcctttatgtacgcttgtaggggccgacggcggggttacggcggggttaagggacgccctcatgtttccccgattcagacgccgagggccttccgtggcgtgcgaaaaacggggcggcgtctgttttaggctaatcagattggaaacctctggaagagtttgactaagaattgtggtgcaatatcggctgacgatgacctcaacgcaattgaatttgtttacaaatcatgtattatcccccactttcagtgatgactacctatcaggaaacccctcattcatctcaaaactcgcacccagttggagtagcaccaggcgagtcaggataaaccggagtctgcgccgtagaagcacatttacaaaagtctgtttccaaaggtatgtccgagcaaacgctcgccggctgagtggcacagtactcattgatcgagatggaggttgtcatacccggtggacaggagctgtgtggcatacagaaggtgtcatagttcgacgagcctggcagtagggtcatgctgtaccattggtttgcagcacaagagcaggagacgactacaagcaacgaggacacacaagttagcttgccgagtacagcaacgaatgtgcagaacagaagagaaaacctaccgctgatcacagttgattcacctcccgccaacgtgccctgatacaaggtcgacgtcgtatacggaatacccccgttcgagcactcggtggtaatccagggtgcgttgagtgggaaacaggtcgattgctctatgcaatgacctggatgccaaacagacgggaagaatccctgcgagcactcgattggaggctctgggctggagcaatacgaaactggaattcctaatgtgcagtctgtcgtgtacacggcggtttgtccattcgaacactggagctcggggcctggggtgatcactgctgaagctgcagccttggtgatcgaggacgtttgatgagggatagccattgtggctgagataaagagcgcgagaaagagatagaatcggtggaggggttccattatgacggtttcacggttcattgagcaggtatcggagaacttgatatgaaacttataatgaggcgatatgtgattaccgcgaccgagtagctggagcttgttttatatcggtatagatccaacaccgaggatgtccaatttgggctctttcggaaattcggagatcactaccacggtaaagtaacagtggctgaagattagctggggcatcagagacaatgagttcagctcatactacctcgagatgcatgcaaccttcgatcaatagcgatcactgggctgagagaaatgtttcaaatgtgattataaaaatagtacctttctaagacaaaaagacaaagggatccttatccatggaaatccatgccaccgttgaaatgtcagccgaagttgacttggtgatccactaaacccacgtgatatgacgtcgtcctcatgccataatcaggcaccaaggcatgatttcccgcgccagacccacttgggctccgagggctccactccacccgtggaccctgacccgcgatgtatgttgtaggcttgtagctacggtctcatttctttgaattgctagacaactcttgttgcttggctctattgtaaagtatcattaaaattgtcaagcaagaatgccactcaggttctatacggacagctgggcagtattcagatgaagtacttaggaatagaccccaaaaggcagtattatacgattagtactccgtagaggaatttggagtagaactcatatggtacaaactatggaatttagtctacttgactatagttcgacatagtaagccaaaatcctccctggatggctgagtgggtgagagacacgaggtcatctaattgctgggtgaaatattgatcacgggtgataccgcattgggaagctcagcaatggtgaaactagtcagggtttcgatcctcgtcaggagtagttggggtacggattttatttttctttcccatgtggtcgacagaccagcctaagacgaggatagcaccttccccacaaggctccttccaatgctgatatattgatgcaggtgtccataaggaatgacgcacatataatgctatccccgagatcttccgtcgaatggatacctacgccttctccttcaccacccagatctccactcgaacaacaaactcgtctcggatgatctagacatcgtcggattgattgtctggcaacacgcatctgtgctgccgctctttctcgccgctggaatacccaatttttcaaaactacgacgaccctgagttgcttatctttcgcccacctcctcgtccataactatacggcatagacgacgagggaaaggccgccgttcagcgtcgccatacccactttttctaattggccttcacgcagcgtttcaatgaacatcatttccacgccatagatcagccgacgggtatgcttacccgccgcatctttagccatgccggcgagccctgggaagggaataacgttcctcttcaggctgacattgtgctcattaccaaactctggaacgaatactcgaccggcccgtgtccgatatcattctcttcagctgaggctgattccatcatacacttgcaaagtatgcaagaagaagttgatctccagctcaaactggtccgcgacttcattggcgtcggcgtggacggttggacctctccggacgcatatgaagctgcctattcctgcgctcgtcagatgaaggttgacggtcttgcttctctcgacacggagtaggaacgcaagatgacagatcgtcactggccatttgacgaccacaacgaggacgagtagagtgaccgatctctacaatagtgcaagaatctctacatccagcagtgatggagttttgaattgaacaaaaccgccgtccccgattgatttagtatcatcgggttttccgacggccaaccatcagtgttagaatccaacattagatcggcaacgtaacttggactatcttggaagtaaagtcctccagttcatactaccagtcccatctgtgccacgggattgtggcacggactatgtacagcgtggccattacctactgaactacagtaggctgatctttccttcgtatggagataccgagacacctgatgagactgtatgatggaacattgggattggaaaagattaagcgagaaatgtagttcgaccgagacctacggtgtacattcctaagactggagacaaaacaaagtggcggacagggatggaatggaatgcgggccagcgaagaagcttgtatgttttacgtacgtagatccgactataatcgaccaatgaggttcaattgtgtaccagccaggactaatttaaaatatcatcacgagaacggcaatatgctcaatgtacaccctcctcgactgactggaggatgtccaacaatcggaatagaataaaacaaatgtacatgaattaaagctcccagggtacaatccagcaagttcgaggtccaacttgatgtagaagcgtgggatatgtcctctcggtcaagatcatggaagaacgaggcgctggtacgcagcgcatcgggttccagacacataggcggacatcacttaaaccgagttgtggccgtgaccgtggcggtggtggagatgtctgcgagcgtggccggcagcctgtaccggctccacggcttccgggacagtgtccttcttcgcgtaggaaacggccgtggaggtctccacgatggtggtcaacgaagtagagacagtccggacggctccagtgctggtcgagtacacgacaccgttgccatcacagatgacgtaaacatcacgttcgagatagatgatctcttcggtgataggatcgatgatggtagatgtgatggcggtcggggttggcgagggagtcgaagtagaagtgaaagaagtagtagcttcggcagcgctggtcacgtggaggttctcaagcaaggtgttgggatcgatcgaaataccaccaacggaaactgtggggagtgagctagtcgggattgaaatggtgggaactgaaaccacactggacgtggtcgtagttgcagcagatttcatcgtggcatactcagggccccactggatagccataccgccaggcaatccgtcctcgtgcagttcacaattttcgtttttgatcacggacgggacggggaactggcattgacgctgttcgtcttcggtctgaacgtcgaagatctcacagtcggtaacgatacctgactcgcttgtgcaggtatcaatggcctgctggagaatgccatcatcccaggcctgcatgaaatcaccgtggtatccgtatccagtgggatcaccgttggcgagcgcgaaatatccatcgacgtccttgaatgcgtaggtgttccagatagtctcgtagaagagtgagaccaggcgagtttcgaaaccctcagggcaggtaccatccatgacgagcgacgggtatgcgacatgagatttgtggtcagtggagtcgacatccttgccattccagcaagaggggaacatcaactcgaagcggactccgtcagtgcaatgctcatcgaggtaggtcttgttgggcaagaagtggcggtaaagggaggcttcagcggttgccgagtagtccaggcagttgaaaccaagggccttctggcgcaaagcagcctgtgaggcctgagcaccactccaatcggacttgggagggtcgggaactggccaggtgaaattgcgctggtatgggtcgcctgccagcatgcggaagttacttgggaaagcagtgacattctctccgtacagaaggtaatagctgatcggtgtcagtagaaccccactacgaaagccaaatcagacttacgcaagcatgcccccaacctcatccaccacctcggcgctgccattggtgtgcatgaagtacaaagcaggaacccagtaagcagacttgtcttgagtcactgcgcacgaggtgcaatcagactcgaggagcgaggcctcatccgagctcatgccaaagcctaaccataagttagcacatccgtagatgaagatcccatcttgacaatgcgcgcttacttccacctccatgaaccgcgtgggcatgagatgagaccgtacccggatccacaagggggtccagccgggcgagaccagttcttccacggcaaggaagacgccagaaagcattggtgaggcttgggaacagcgcaaagcaggccatcacaatggaggccatccgaatgtcctgcatcttgcgattgttgagccgcgtctacgggcttagtggataaaaagaatgaatgaatgatctcagggaaacaagtgtaaacgacagactcgccaggagtaccgaatcaaccggttaggcgtagagaaaggagtgcgagagatgggttgttgaggctaagcaataggttagaggggaagtcaagacattaagcacagctccatgcagatcgcagattttcaagccaatcctcgtcaaacaatcttatattgcccccttccagtacaagggaagaggaatgaccccttgcttgcgggctgaacacaccaccttccccgatcgaagggaaaaaaaaaggtagcagaggtatgcggacttaccgatcaaacgcgtttctcctgacgtcagtaaacaaagatgatttctgacgatttctgttggcgatgcctgaagatgcgcccatttatcagcctcaactctattttgttctcgatcgaccaaaagtactcacttgaatttttgtaaacaaataataaagaacgaaacagtaaatgagcgacaataaataaggagtgacaaaccctgagatagggcaaaaaaaggcgcgctggatgaagaggggcaggggaacagattaaggagcagaacacggggatcaagtacttcaggcaggaaacttgggaaaaaaacgcatatcccccttagcgcttggagaggggcctgagtttaatgacatggccaatcccttgagatggtagatattaggtaggctgggggcctcgtcacgatcagaagaatagcgtgccctgtacgccgtctatccctactgtattacgattggatatccgaaagtaaaatgagcaatcctggcttaatctgggaatgccagaacacgagggaaaagagaggacttcccgatatctgcgatgaaacgaacggcgcgttcctggtctaaatcactagctccgtcttggtgcgtcttggtgacccacgttggggacggggattggtttaaggggaagatgaaacgatccgtaaattatgcccctatttcttattcgataggggagatttgcaatcaggacggagtgagtataggcatataaaatataaaatctccggagtacaaattatagagagcacagagcacatgacatgccggcggatatacatcagcttcaaacggaggactccgtacctctcgatacatcgtccgactagctcagacagtagccgtttgggtttaacaatttattcctatccctgcaatatcccgatccaatccccccgtaccccgatgtctcagatctcacatgtgttggccgtgaaacagcgaagctttttggtatgattaaaggaggacagagtactccgtagttcaccggcagttcagtatctgatattttacgtggagataacaaattctattcggattactagaacgtgaggaccgaagttgacgccgaaaatgacctagttatgctagttgttccccctgttgactggaaaatggctctctgcagccaaatcaaggtgctctcccttatcgcctagcttgggcgtctataatatgcatcttcgcttccaatgtccttacgccctgccattacctccttggaagtcgacctcagtgttattgtttccgtgattcttacattctaagttccaaagctggcctccctacggaatactccgtgggctgagccgtaacccactcaacccgctatggattcgtgggcccattgaacccaccaaataggtagcaataggaaaaaacgtgacttgaacgcgactgcatgattcatacaattctggatagtatttttaggtagtttatatacatgagaagtcacttctccaatatctacatatctcagcgataaaaatccgtaactaaatgatttttctctctaggactgccaatcagctggcttacgtaccctagcacggcctaattccgagctaatgaacagaatgggtcgaaatgggtctatgggttgtgggttgaattttggcgcagactagcctccccattctcgctacgcttgggatcccctggaagttccctattgggaatgaaaaaacatccgagaaaacacaagcctaccaacggaaccagcatgatgaatacggctcggacacctttcattttggcatccaagatttgggaatcccatcccaccgtgtctggttgtccccgctcccagctaccactgtcaacctgctcgcgaatcgatgccggcagatcaacgggcaacgctgctttcatgaccgtgctttgaatcgcggtcgacaaggccatgcctaccacggacccgagcattcgcatcaagtttcgcgtggaggtggccacggcacggtcttcgggtttggacagggcttgtaatgcaacgagggctttctatcggttattatcgatcgcataatatgcagcaaatggcagacttaccaggctgaaggacaaagccgatgccggccccttcgataatcaggacaattacatacaccgctgtggacgtggttcgagaaaaaaggagtttgagaccagcgcccaacgtccacagcgccatcccgcagtacagcactggagcgtacctttggagcaatattcagtaaagtagtctcacgtgtgcgatcaagacacttaccgagccagcttcgtcattacgggtccagatatgacaccggccacgctctgcaaaagcaataatggaagaatgagggctgcactctggagtggactgtagcctcgcacatcctggaaatatatggggaggaaatacatgtcaacttgccacacggagttatacagagcactttggaggtagatgacagccgtaggtacctggccaaagagacgcagcggaatgattgggatcttcgcaaagcgcttctcaataatggcgaacaggataaagaagaagcccccgacgactagcatggagactactagtgcgctacgccacggccagatactccctccagaattgagtgggatctgtaaatccaaataagataaaaagatccccgatcaaagaatgtggtttacataccagtaagaaaaccacacacgcaatggccgcagccagtccaagccaatcaattttccccagcttttcccgccagctaccagacaccggtttcagcggaagacatatccacataacagccatacatcccgtagcaagaatcgggggaatccaaaagatccaccgccaaccctcacgactgttcgcacgcaacatagccgccgcgatgaaagggccggtgctagccccgagtccaatagcaccgctcaacatgccctggtacttaccacggtccttcaagctgaccaggtcgcttacggtgatttgcacgagggagctgatgccgcctccgccgataccactgagcgcgcggcacacatatagccaggtgacggtctgcgagaacccgcacaggatgtcgcccaggacgagaaagcccacgctcagcaagagtacgggcttgcggccgaagatatcggaaagccgaccgtacagcgcttggaacgcggtctggcccattaaataggacgtaccggtccaagtaatgctgttcccggcgtcgagtgatcgggagatggcgggtagagcagtcgccacggaattgatgtctagggtggagatgaagtagatggccgctagacataggtaggctgatagcaaacgtcggaatggtaaacgtgaggtttgatcctcaattgtgggagttctctgctcatggctctgtacaggagggtctaaggactgtagctcgtgtgacctgtcctcttgaatccccgggatcctttgcttttgagatatgtcttgctggggcggctgtaatatttgcactgggcggttgtccattgtgcccgactatgtggttctgcaaaggaaatgaggcgggtaagacttggtgatggcttatggcgagcgggctgagcacaccatgacacaagaacgtatttggactttatgtaccttttggagaatagggtcagtcagaatgtgaggctgctcggactattttggtgagagaaatcgcgacatacaagcgtaaattacgtctatcatggtttccttggcgtcatgtaaaatacaggatatattaggtctgatgcttgtttctcataaacaaaagacacattggaatacttaagcacattaaaggtgatgattcatctcaacaggatcctaagctcggaaagcgttggaatattgggttcataacgaatatcatacaaatcagagtagattgaagctctaaagtctatcccaagaaggcaatacatatacagtacacagttccatgttgtacagcgcagactacagcttgacctcctctaacgcctttctcgctcttgcaacagactttcgggcacggtgatcagaaaactcctcgacagtcttgccgccatcccgcacaataccgcgaagagcagcttcagtatccagcagcgacgtgcgtccttcctcgcggacctcgtcctcccagaaatcacgagctttatcccacctcttctgctggcgacgcatagagtaaatcaaacccacggcggcaagggtacatgactcgtacacccctgcggatggaatagcgacatacgttagagcggagagagcagaagtcagagtcgtcgtggacacgctgaaaagtaccagactctgagcgagggcttggagggatggcacggtggtggtgagcagcttggtgcgaagatcagggatttgggttggccagggaggcatgacagagtccgtcgccgagtcggggcttgaagttgaaggctcttctaataggccagcctgctggtacttgcccacggtccagatgacctccttctccgcctggcgaaggaatttcctttccaaaatctcggatgtaaccatgcccacgtcgtcaacgcgccagaagagtttccaccatgcaagaccgcgccagcgtggactggccagccctgcctcgagggaactgcggagctcagagtgagcacgctccgcccaggaagttacggctcggtccaagttcgaccgaacctcttcaggcgctacgccggcggtttgatcaaggagcgccttggcgtctctggcgattacactagcatcggctgcgtcaataagggactccactagagggaccagtgctggattcaacgcatccccagtggatgcttccgaggaagttacaagccaatcgatgagaggttgcacaccactgccattccacccacgctcgtagtcggtagcattgtccacagattcacggaatttatccagggctgtgctggcacggttgacatctaccagggacacttgctcgtttgtggatttttggtctgccactgcaagttcaatggctccgcgcaccgaagaggcctcgttcttcaggtctgaatgaccaaccatcgtgctgtacgacagcaggccatccactccacgtccacatacgatcgtgcggtgcactggataccgaacaacattatgccgaccggagtgcgaggtctggatggtaactgtggggacgaggaaggtgtcggcgtggaacgtagcggcgtgatcaggctcgacgcctagggtgctgactaggatctctaagttgccttccctcaggataggtgatggcacggatatcgtcggtagcaggtcattggggatggattgtgagatttcgccatatctaaataacgaatccctcaaatcagtactggtcacgggggatcaacacgcagatagaagacttgttcatacctgatcagcagtccccgggatgaatcggcatcgtaggagtcgagaatgtcttcccagttttctcgcggcgacaatgggtcggcaagtagtagtcgaacaagtttgcgtgcagaggtcgcatcgttcaatccaagaactaggttccaaatcgagaagaaatcagtgccatgctttcttcgaggggaagatctaatgccgaagagagcaatagcccgatcgtacgacccgaaactcaccagctactctgatcagaggcgtttcagactccaatccccgcagtgcaaattgcaaccgactgagattcacttgttctagggcggcatccttcacttcctcgagggcggcatgcagctccttgaaccgcggcggcacgctcttcgcagtgataacagtggatgtgctgaatatccggggagccgatgctgtgattgtattttgagctctggcgacccgtcgagatgtatggggtgtgtcgaggctgcgactggtgttggcgcgcaaggacaaggttcgtcgccagatcgcgcatgaggggcagtaaaagacagagctgatgtccaatggacgcgacaggctctttgccagcgcactgcgcaatcttggagccattgacgcgcggtgaagcgaggtttgtagggtatgtagttatcgcgatggcacttcggtagatgaacttggtcgagcggaagtggacgcgggaacaaggcttggcatccatcactattctaatggagatacagcaagataaatttgcattatatgtttacaaccattgagactatttccctactgatggctacgaaacatgggaaaaagcacacatgtttaactgaactgtcctatttatcgctagaattgtggattcacgggttaaatcgccaggcgagggtaaggatcaaacagatagatagggtatcgtatcgatcgtgtcgggacaaaaggcgtgggcgctggaggacaggaagaagaaatgcatagatcgtgtcataatatctcggctacatcctggtttaatcaggcatccttaggaggatccctctgtcgagaacgggggcgacctgagccagcggacctggtggtttcaattagtatgtggaattgggatagtggcctcaagtgaaaacttacatgctgatccgtcgagcaaccgtggcgagtccagcatcgttggcagcctcatgctcagcccgctccatggccacacgacgactctcctcgctctttgccataacttcttcttggctaggaggcacgtgctcgttctggatatcaaccttacgggcatcctcgaagttgtgaatagcctgtttgataccttcggcacccagcatgagtgttccagcaggaagacgaccgccagccgccgtcttcagctcagtgacactctcagactgctcgcggagaacctggaagacacgagagaggcggccaatggcaagaattttgtttttgatagcacgtcgtttgaactcgctggattcggggtccgttgacggaggcgaaattggttccttatccttgttttcaacgggagacacaggtgtaggaacctcgacgtcgacctcgtcctccaactcttccttcgagcaggtgttgagaatggcgatgagcatatccgtaattttctcaccaacgaagggcaaagaccaagtgaaaacatccatgaagttgggcagccaatatgggtggggggtgcagttgaattgacggatgttcatcacattgttctcatatttgaggacagccgccttgttgttgtagacatccaagtagttaggcgcactgaaaatagtcataacactggggaagccggtggttcgcgtctttctgtacatgcgatatccggcatcctgagcctcgtgtgctctgatgatggagagcaaattgttcttctccaaaaacgcgcatgccgcgggataagagaaaaagtaggaacaaccacggacactgttatgaatgaagaaatcgcctgtcttttcttgaccgaattcctcgagagggtcagcccaaaggatgtcgcacatgagcccgtgggttgggggttcgcggaagcgatcaatctatgtctgtaagttgtttgagcttgaaactgcggacgggacatatacatacagccttgatatcttcgagggtatgcagttcggggctgaggccgccgtggatgcagaggaactgtttgttcataaccgccgccagcggcagcgcacagaaggattccagacatgcctcgtagatccgttcactatatttgtgcttgcactccaacttgaaggtgaagtagtccgtcaagtggcgacattcatgattaccccgcagcaaccaaagtgaatcgggataccagatcttcaaggcccagagatagagcacgcactgcggggaaaaatggtcaggacggttctagattcgaaaaggagactcggatgatctacctcgatactgaaataaccacggtccacatagtcacccaaaaacaaatacctcgtctctgaagggtcaccgccgacctcgaacagcttcatcaaatcgtagtactggccgtgaacatcgccacacactgtaatgggcgcatccatttcgagcaaattaggctcagcctttagaacctgtgtaccggcgtggataatccatagcgcctgctcttcagaaagacggccctcacgatagaggtgctgcttgaggtactggagattgggcttggatgggtcttccggcgaccaaaacatatcatccggaggatagctgagagcgggtgcttggacctctaaggccacgaaagaccgttagcgatcaaattaccagatcttgcgaaagcgaccgagaccactgcggcattacctttgaccaccctctccattgtcgacacctgcgtgttgtcctccatcgtgtgcagtgtgaaatcgatctccgggaccggctgcttctcggtcacggcgcgcgctatagcccgatgcattttgacaaagattgaaatgtagtttgaattttaagttcggagtaaaggggggggggggggcggggggnnnnnnnnnnnnnnnnnnnnnnnnnnnnnnnnnnnnnnnnnnnnnnnnnnnnnnnnnnnnnnnnnnnnnnnnnnnnnnnnnnnnnnnnnnnnnnnnnnnnnnnnnnnnnnnnnnnnnnnnnnnnnnnnnnnnnnnnnnnnnnnnnnnnnnnnnnnnnnnnnnnnnnnnnnnnnnnnnnnnnnnnnnnnnnnnnnnnnnnnnnnnnnnnnnnnnnnnnnnnnnnnnnnnnnnnnnnnnnnnnnnnnnnnnnnnnnnnnnnnnnnnnnnnnnnnnnnnnnnnnnnnnnnnnnnnnnnnnnnnnnnnnnnnnnnnnnnnnnnnngagaaaagggcgggggtgtggcgggggcgagttcagcgcgggcgggatagagctcccacgacgaataagagtataggattaatagaacactgatcaagccgaagttcaaagggatcgaaaaagaaaacagtgcccaggggggtaataaaatgggtactgggggtgattgtgtgctgggggagatgtgaagggaaaaagagaaacaagttggataagcggcttctggctaagatcggtgggtctcacaccaacgttgatcgtgactgtatctgagacgtttcctttcgtttttcttctttagggggcaaagtatgattgatatctggatgatgtgagagacaagaattagatcaagttcagcctcatgacaacgtgatgactcgatgcctaaggcaactgtgatattttttaccccacgctatcagattcgatcgatcagatttcgattatgtcgacatttcactgcatagtgtgagcgttactagcaatattgtatggttcagttttggcctcggcttcgacctttcagcctaggcccgatttgcttagaccgctagacttgcgtatgcagcactgatggtctgcacgagaaatttttcatatctgcagctattgctcttcactcgacgtcggatcttatgaggcggacatttatatgatagggatgcaggcaacttacagctcagacctgccgtaggctagatctacaatactacaaatccctcaagaatgcccccctaattgatatgctacatgccccacagcgtggcagtttgatcaacaatcgttctataaatacatatgaattgagtgagggatatgactgacacaaagtataggcaaggcatattgtaagagcgaaatttgttaaaataccagattggaaaatgttgaagtgcctgaggtgttagggcataatctaactagttagggaattgtcttgccaaggaggcgctttcattcttccgccatgcaaagatatcttttcatgtaaacaaccatgccttgcgagtgtgcgcgagtgagactgattttgaggagagccttggaatgtacggttcttatcagcaggtgcgctgggttggtcaatattgatgaaacaagagatatcgtagggtttgtatcatttaggtagcaaaatgtcgtttttccaagtttatcttagattaacctccaagttcctatcgtactcaaactggctgcaatgttgtcccctgacaaagtatatatcactcactctcctctccactcatcccctccaatcacaccaaccacacagtgctagcgaggagatggcccctaagggtactgtaggggatgtatatgagtgtgtattataaaccagtagccatggatactctctattctctctattatatcccctttgcatcaggcgaataagacttttagctctaaggtttatccttgagactttccaaggttcaacttaagccatattagtcgtcgacaaagaagcaaattatacctaagatgacgtactacgtaactctaacgtcgtctattctactatttctctctggctttgcaatttttttcagcttagtcttcctctatatccatttcaatacaccttggtatcagcttcgctttgatgacggtatcagataatctagactgcaatcagcttggaagattcttgagtgcagtactcggagcgaccgttacacttattctagccaaaatcgtggagaaatgctactattactttcaatggcggtatcgctctgccaataccacaatattcaacgcaagaaccgccgccggtgaagatattcgtgcactggataacccagacgatactctttatcttccagattacaacacacctgttatattgccggggcatgctatctcaaatatggatcgagatatcaagaaggaggatctacacaaccttggagcgacaaggccatggaatggttctgtctaatattccaggactttaaaagggagcctcaaacaggattcgaggtagaaaacagaaatgaaaagagacaatgaggaattttgtatgtgctcggtcatcacattggctaccacctaactgcattcatgctctaggtgtcgttgaatttgcaggggaagggggtggggacacatttatttgctggaattacgatgctcccagatacttccctgtatgttacttacccagtttcgctacaatactcggatcctagtacactgtatgctcaatgtctttaagagcctgttagcttttgatctattggtatttttgattccggtgattttaattctattacaattacgaaatatattaaacagatcactctctagaacactctcatgatgtaccatgatatgaatttcacaggcctcttatgagtcatgaccataccttaagcttcccctactgcagtagagcctaattacaatgaaaagatagaagaaaaaagaaaaccggaacccggcggttggccttaccccctcgcgttaaaatcgagatcctaattgggtagccttggcgctctgaattattgtattacctaagcaaaagaatccgatgatcgctcggcccgggttccgaaaataagtccctactaggatgcgttaacatctgagacgtatagtctaccaggcaaacagctatctgctgactcctgcaggacgtttggccagaactccaaatcacagtgctcagctgtaaggtgtttatggatatttgcgggccaattttcagtatgtctgtcatagttcttgaagagtagaaaataaattatctcaaatagaaaagagtacaagctaaaaatcgctagagcgagctacagtacaacttatcattctagcaatgatagatatcagtcattccatcccctaatcttctataaagcctcacaagtctctcctattcactcacccagcgtagccttcatctgccgactccattcatccctcttgattcgcagaagaatcaacggaacgccacttagcaaacagaataaacaaattgcattaaacgaccaacccgtgccaatcgcattgaacagcggctgtgcaatgaccgcgcttacacatgacagactgtttcgcacgaggttattcaccgcgacgccgatgaaggaattcttcggtgtaaattctgtcagcatcgtcatggtgaaattggtgagaatcattccgccgagcccgtaaaagaagtttccgaggagctattatacagtagattagtccctgcttgaagctggaaggggaaggaagcgatagaatgaatgaacttaccgggaccaaccagaagtcgtgcttatcggccgtccatccccaccacaatagtgctccggggaagagaacacccgcaaggagacagttctcgcccagacgatcgaccgggtggaggatcaactcccccttatcattgtatcggccctcctttcgagcggtccgcgtcatgatataatcctaccagcggccgccaacgatagcaccgaaaagtaggcccaggccacccgggatatatgccacgccgacaaggatcgagctccaggagtatggtagaaaggcgaaggtgtcttcgatggaaacgcatatgaggtaatacgtagcgaagacaatgctagtgtaatagaccgtaataagaatgggagggtattgaaggagcttggtggcttccatgggctttaagaggaagtagagggctttcttgccggggctaatggcgtcgtttcggtgcttgtcgcggttctcctcgaggttggtggccatctccgggataaataataccatcactgcaaacactgcccagttatagatagccataaaccactgcgtgctgcgccaactccaacgcatggtgagcgccccgccgataatgggagcaagcatgggccccagcatgggaccaagcataaaagcgcccatagccttgccgtgctcttgcgtttcgaaaatgtcagaaatgttaccggcgctgactgcttgaatggaagcgctggaggcattcgcaaggagtcgcatggcaataaacatgccgatgttggggctgatagcggcgagaatgccgaagattccaagaaataagaagaatagtatgtatactagtcgacgaccatagagctcggctaggtatgaccaccacaagggggtgatggcgacagagagtgaaccaaaagcgatagacaagttcaccacagacacggtagtgtgcatatccttggcaatctctatcaggcaggctgtttgaaatcgaatatatcagtttcttgttctggctggggaaaatgatgacttatgaaaaagaacaccactactcagcggaaccaccaaccctcccatcgccacaataaaggtcaaagcccacttcatccccggggtataatgcgtgggactctgcaaggctgggacaaaacataaccactggaaagattccctgcaaacgtgttgcgagctattagtactgatttcttgtctgattccgagttctgccttggtaacatcttgcgtgggctcattgagcgaatctgttcgctcgtcctctggcgttgtttctgtgattgctggggattgcatcatgttcaatgctgctggagactcggcgctactgcatttatgtgcgagggacatgttggtcgctcgatactgaatgctcctgctgataagtcctcttggaggtatataaaattatcaaatccatggatccacctcggccgaggtgtggggcctcccgcttcgtacgaggctccacccgtggactgggcaaatatggagtaaccttatttaactgaggtacccctacctcggtaaaagaagtactaaaggcccaagaaaatctccgaagtggcatggagacaggaagagactgtctacgggatctgggctaaaacggccaaaaatctgcaatcccaacgagattacttggattttaagtgatttctcaaatccaaggccattgattgaatacttaccctcttatcgcagtatcggacgaggtcgtccagattcctctcaaattcgctggcaagagtctgagcagtgctcaataggctttgtagctccactaatgcttcagccgcatccacaggactgctgatgcgcaatttctttcgcgaagcatgtgtcacctgaataatacgcctgtaatattgaactgtggtgatccgcaggagatagatggtcatatcggtgaatttgggggcatccgagagcccggatgagggttccactccttcgatgagatcgacctcatccaggctgaggggtcgacgcgtatcgaagtccgactcatggattgaaggcgcaaaaccctgatcttcagccgcgcggaaatccaagtaacagatctgtgcccacaagcgacgatgcagctccacctgtacgacgtccatcgtccccagcagtagagctaaggggtcccggtgaagtccgtggaccgtcgctatccgaatggccagcccagtcaacggccatatcttccccatgtcatcttgaaccagtgtatcttcttgcgatcgcagctgtacgggcaaaggcgcctgactatgactggggacccaaaagagcaccgcctggtcagcgcatatcaccctctgttgccctcgaagttgcgttctcggaatcagatgcaaaattgaattccgacgtccggttttggctgaaccccgatgatggcaatgcgaagggatgcctaaccctcaccattgagcgctctcgaccggaaattagaatcgaaaactgggagaagaaagagaacaggtgccatcgctcccaagtaacctgggttaccagaaaaggaacccggacgcacgtcacccaccatccgctcatcatcccctttgaaagtctatttctgcgccagtcaagtcggcccgaggagaaggatttagcgatcccagaacagcgactgcagataatcgcggagacgatttgggaagtccagggttggtagatttggttcgctctctttctttctttcttaagtaatactattggtccgggatcatacgaaagaggcttgatagaagaacaataatatgaaggctgagatcttatctgaacatgaattgtctttcaactatttcaaattctctactagcctgagtggcactcaggctttgacgatatcgaatccctcttcccagttatctagggctgcccgaatctccctgacataagcggggataccagcagagtagcacactggctcagaaaccttgccagggatgctaccacccatgtatgtcgactgtgttgtggggaagagagtcctgtcattgagctccacaacatgagtcttccacttatccgcagcctcaatcttgggattgatatacttgacaccgttgccctcgatcttggcaatggcgtcggaaatccaccggccctgcaccgcgaccgacgtggggccattgctcagaagcgtcggaccatgtgcgccatagatgtggaacatattggggtagccgctgacagtagtaccgaggtaggtcttcgcgcctggaatccattccttctcgagctcggcaccattgatgctcttcaggccgagctgggtcatgacaccggtaacaacatcctgtgactattagcgcgtgctgtctcatgagtgtatcaagaagaacttacaaatccagtcgcgacagcaacgacatcaagttcatggtgagttccgtcctcaagggtgatgcccgtctcggtaaactccttgatcgggttatttccgatgttaaccaggtgcaccgactcccgattgaactgctcgtagtagtctctttcaagacacggccgcttgataccgaagtaatgcggcatcttcagtggcgcaagcaaatccctcgcaacggggtcaccgatacgatcacgggtcttcttcacccagaaattgtacgactccttgttggcctcggcattgaacaagttatccttgtacacaccaacccaaaagcggaagccaccttccttccagacgctctcgaagaaggcctcgcgctcctcgggtgtgtcatcgaaggtgttgcgctcgtaccaatcatacaggaagcccgcaaagctggtctcgcggtaccggaacagctctggatagtttggcttgaggcgttcctgctcctcaacagtgaggtctcgcttgcgcatggggacggcgaggttaggggtgcgttgaaagactttgaggtcgccggcctcagggccccaagcctgcgtgatttgcactcccgaggcaccggtgccgatgacagcagcgcgcttgttcttcacctcgattttctcctcgggccagaaggaagaatggtgcacgatacccttgaatttatccatgccaggccacgggggaatgtaacgcttggcggcctaagtggttcattagtaggtcttgatttgactgatgggtgtaattgctcacaaagccggttccaaggacgagatacttggccttggtcgtgcgaccatcggcagtcttgatattccatttgccctcctttgtatcgaactgagctccaatcacgacggtgttgaaagagcagtccttcttgataccaactactttatccacgtgatcgaagtaatcacgcaggttttggtagttggggtagttgttgggccaattccacgtgttgtagacctcgggccaagagaactcgtactcggggacttcagagtcgacaccggcgccggggtagcaattccatcgccaggtgccacccatgtcgttgccggcctcgaaaatgaccgtcttcagaccgcgatcgcgaagggtcttgagcatgaaaacaccggctatctcgttagctaatgaatagatgaaccgtttactgtcaacttaccaaaaccagcaccgacgaccaaagcatcgacctcgagattgtccgcatatggcccagtcttgtcggtgtgaacagtcgagtagtccgtgagctcagtgttatacttcttcggcttggaggccgtctcctctttgctggccatgattggaatgacaaagtgttgtagttgtaactgaataagaagattgattgttggaatgtatgaagccttctaccccggacgcctcctcctacttatacatagcttcgttcacgccttactgctgatgttagcatatgttgtcaacattggaacaatatcatcacatagtcccatgacgcggagtacaggtaaccgcaatgcacccctccttcatgcgtccgcgtggcagacttttggggccaccgggacaatcctttttgtccaccaatttggtctcagaattaatacatcatgagttggaatctggcctctcaagagctccttgtcatggtggccacaaaaaactgctgtacaccacgtcacattagggctatcctcaacttgtcatcgtaaaatatactgcagctgtgattggtccccaccgaccgggaattgcggatccggaactgagacaaccctccagggttgagagcttccccgcattcggctccgcaatgcggttccgcaaagtatagtctccaaggttcgtattgccccggaattaagcgaactcctcggtaccacggggtaatgggaaagcgatcttccgcttgtttcgaactgttaaataagtcagtcccgcggtctccgccctgtgtttatcttaaatccgaactctcgtcaacaaacacatttcccccccacaatttccccacaatcgcctatccttccctacacaaacatcaacaacatgtctctaaatgcacaggtgcaatcgcatctccgcgatattgtagacaaagcttgtgaagaccaaaagtccggcattcctgggactacggtcgtggtcgttggcaaagatggcaacgaacttttcgctcactccgcgggtaagcgaggcgcgggatccgaagaccctatgaccctcgataccattttctggattgcatcttgtactaaggtggtggttggtcttgcttgcatgcaactggttgagcaaggaattctcaagctggatgatgcggagcagacagagggtctttgccctgaattgaagagtctcaaggttctgctgccagacggtagttttgaggaaaagaagaatgggatcaccctgcgcatgctcttatctcatactgctggattcggctatacctttttcaatgagagactgagacagtggtcgtacccgatcggcgcggatgagttctctgggcggattgaagatatgaagatgcctctgctattccagcccggtgaaggttggcaatatggtgtaagtatgatctttcggaatcacgaaacgcattgctaatgagtacaggttggtatcgactgggcgggaatcgcactggaacgcgcaactggcctgacgctcaacgaatacctacaaaagaacatcttcctgccccttggaattaagaacatgtccatgatcccaagccatgacatgcgtcagaagctggcatacatgaatcaacgaaacccagatgggactctgaggccccgagaccatcctcttcgggcgcctctagtggttgatctggagaacaaggctgaagtcgccagggtgttcaatagcggtggtgcgggtatatttgcaaagccacaggattactgcagtaagtcgcgggtagcttcgatcccaagaaaccacacactaacttatctccgcagaggtcctcgctgtgctgttgaatgatggaacgtgccctaaaacgggcagcaagttgcttcgcaaggagaccgtcgacgaaatgttctctaaccagatccctcagttccccaactacagccgtcaaagcatcccagatgcaaagccggacctgaccaaccccgttcctgaactgtacccagttgctgggaacccaccacagggttggggcctcactttcatgctgagcaacggcggtccaacagggcggtcgactagcacagggcactgggctgggctcccgaatttgtggtggtgggcggacagggagaagggagttgcggggattgtttgtacacagattctgccatttgtggaccttaatgtgcttgggctatggggaacagttgaggctgagatatacaaagccctcggtaaggcttgatgtgggagacattgttttttatttaccagccttcacatgtttcaggagggatacaggtaatttacccagaggtcatgtgaccgggatgttctgaagatgttcaccggtgtatatttgtaattagtcagcatgtcacgggtccagttgaaattctccattttgtcagccgctgattggtgcatattaatttaattcctatcagattcagctagcccgagttgtggagagtaatatattttccttctcctctcctatgtgtcatttacttgcaaaaattcctgtagtcaacccatgagttattctcatcactttcagataaaaacagacaataccattcagcattcatggatgtacggcggactaagggaaatccggggaatgcggggtcgaacgccccagaaaatagaaaaaaaccctaaatatgaagatccgttgcaatgcaggtttacgtggttcgttccccgctttttgacgacatctcagattctcacagcccctgggcaaaacgagaaagaaggaatagaaatcaaccacagcggtcgatatgtccgtccagaaacgaagcacgacacttgcacaaggatccagatccaggcgtcagtaccgctcttgcgaccaatgcagaaaatccaagcgagcatgcgatgcaccatgcctggatccgactagacgaacagtggttaacaattttgacggccagcgatcaccttgttcctactgtgtcagaacaaataaacgctgtactatggaatgggcccgatcacagactcagtctgcgctgagaacgcctcgccaatctcattctgggtatgggagtcgagatcttctcttcccatggaaatcaaatgagctccagattgaaaccggacctggaacatggagcaatttactcgatccaaattatacgcgggaggttatggattgggactcggagtcagcaaacgtggatttgtctgggtcgttggtcgattgtacttcaacgctgttcagttccatgctcaacgagcccgagacctcccaggaaaatgttcaggcggagattcctgacgcattgatgcctgcacggtctgtgtctgatctcattccaccatacttccctatttccccaaacacctccatgcaaccaccctcggatctcgaacttgatccaatgtatcaacagatgtggctggcctcccaggcttctcagacatatagtagcctcggatccgccccatcccaaagcccgcggcgaccgagtgactccgcttggatgtctgccaaccagcaatcctccgactggcccagcccgcaaagctcactctctccgttttccatcgaccaacaaatgattaacacatccaactcccatttaacttcagtcaacctgctgcaaatatatcacgatgtgctagagcataacctgtcgtgttggctaagcgatatgacttgtccctaccaacttggctcacgaaatacccgtcagcttgtacccgaattgggatattcacggtctaatatgatataccagcgcacgatcaggctcgatcgcgtcgcacaatcttccaatcttctccagctgacacgcgccgaggaccaggccgcctccaaagctttgcaccttgcaatcatggcatttgctacgcagtgggcacagggcagttaccgacaccgcgagaaatatccgaccaggtgtctcgacggtggagaggacgaaatcgccaatggcgtcgccgacgagttcgatcgcattcttcagaaccacttttgggagcaggcgcagcgcgcgctccaacaagtcgccggtttggagtcgtatagagttacatgggccgagctgatcttcggcttcacacaaaggccgtggaatcccgacactcggccttctagacagcggatgcaagaacaaggctccgagtttgccaccgaatccgtcttgacaaagttacacgatataatacacaaagatggaccaccagtatacatggagagagcagctcggaaaatgcacgccttgaaatttcgctgcgacgtgctcgaaaagggcctcggcaagccgtacggcagtcgcaagaaagggacccatggcattgaagccatgagtgcggaagagcgagggacaattggcctgctctactggatggctatcatgtgtgacaccctctcgtcgtctataaacgaacgacccgtcgtggtgctggatcaggactgcgagcacgaacggcaaaaagagatccagcaagcagggaatatcgacaaatctatcggaagaagtcgatggaatctcgatatctttttgcaaggaaacctcaagcagatgcgccgaacgcactggccctgttcctatgaggctgcagctgaagacgtgatcaagtcagcgccagtcaaggttcttctattccgccacctgtcttacctacaaaacgcggttcgcaagagtgttcctgaagagcagatcgaggacattgtccgcatggcgatgttgttatatgaatactggaatagaacgcatggcgccttcttcgatgaactagtgcagaactaccatgcggttccgcagcgcatacggggctggttcctctgtatctctgcgcactggaaccttgctgctcttatgtttgccgacctgctagaatttatcgacgagaattccctaggcgtggatggtgcaactcgtatcaccggtcaagtggcgaggagaattaggatgcacagcgccagggaactatcaattctggcaagggtcggtacgccgtctaccagaaatagtgataacctttgtgtgccgcagatgtcagacttccaccacgctgtcaaggagagcacgcttttgaccgagccatggacgatagttttaatcagagcatttaccaaagcttctatggtctttctaggtgaagcagatgagtccttgcggtacgacggaattattctcgggcagagcagtcatgatttcgaggggaatatggagcaggccgaggattgtatgaaggggctgtggctactaggtaaaaagtcggatatggcacgggagattgccgagatcctttcactagcgttgagagaattgcggaagaggtgtgttatatagcttccacaattctgcaatcaacttcatattcactaatggacgcattttacagtaaggtggccgctcttttaccggttgggttgtcatagtagacgattgcggtgaatgatactaagggactaatgattgacgggcactacgtctataaataagcctctgttctgtatcgcgggagtattatcaaagtacgagatctcccttgatttggaaacaagcacctgcgattataaacctttaattggggtattctaggtgaggttcatatattacagttcgctaaattactatgatacatccatctcgatatcaaaatatgtgttaaatgccccaagaggtcaacgattgagttgctcctgtctttcacagtctgggccttcaagaagactttgggcagagtcgcccattgttgttccacgagtaaggcaccgggtcaagagtctgaacctcccagtcctcagcaccaacggcagtcagggcaaagaaaagacccgtaggatcatacttctgcttgagcgcatagagacgagggtagttaacaccgtaaaaggcatcctggagattcggctcgacaagatcggcctcgctcatgtaggcacctgagtctggggcaatttcacgtagaacgtccatccactcagtcacgaagcgcgatgagctctccaccacatcccaggaggaggtgaagttccattcggaaccgacaataacgtgtgagagggcatcgcgccatgcagggagcacggcattgtctgtggggggctcagcggcaatgccggtgccgctgatgtggaagccggcaatgaagagaccctataacatgtcagaaattatttcaaaaggggagagattatgcatttgtgtatgcatatatgacatacctgggtgatagcatccttgtaggcggcccaggtttgattgcggagatcatcgctctggaaaacgctgcgggggagcaggcgagaggcagtcttcacgacatcggttccaacgtattcctgagggaaggccacggcccaggcatcatggctggaagaaagttttagctgggatgtagatgcacagattttgcaaggaacggggagaactcagacgtacaagttatccgcgtggttgtaccacggagtgaaggagatattaaggcttttgagggtatcaaaccatggagccaggagtgcctccgtctgggcaacagtcatgttgggtgcgacgaaggattccatacggaaataatagtcaggatcaccggcatacgtcgtaccaatcaaagcatcggaagcaccgatatagaagtaaccgtaggtgccagcatcaacaaaagtctcaaaattgtcgaggtaggactgaatagcagcccagaaagcgtccggaccaggagtgtcgctgattgtgaaattgaaggtcacagtagtcgtctgcagctgaggtagggccttgactgtaagagaggtgacgactccaatggtactaccaccaccaccgcgaagcatccagaagacttccgagttctcagtggaggtggcagtgataaatcttccatctgccagaacaactaaacagagttaatagggagattctttgcacaaatttctcatagaaaaagagacttaccttgcatagccagaacctgatcggccgccagaccgtacatactggaaaggggagagtggccaccaccagcaacgtagccaccgcccaaaccgacagtgacagcttctccgccaacaaccgagtggccgagggtcttagcaaactcataagcctcatggacttggataccggagccaaacttaatggccggaccaacatagccattggcagccttaaagttcgggagatactccttgtccttgaggtggtgggtccaaatggagagagcacccttgccggaggacttgccattgaaatcatgtccagtattcttgaccactagccgcaagttcaagttacgggcaaagttgaccgctagctggatctgagccacggtggatacgttcactgcatacgtcggatatgcgccctgcgtgcagctggcagtatagttgaacggtgatggcaggcacgagcggccttggtatagcggcgacatcaccgaggtaggatcttccatatgcaggtccgagctgagccagtcagctgtgacgcttgcgcacttggcggcatcgtactgcggccagtctggatagcagtaggatgccaggggcaccgctttgatcaggctgccgccaagcaagatatcgaagatgtcccaaattggagccaccggccaccaggagtccccgggcattagcttgcagctacgatgagcactcctcttgagtaccgtggagttgctcgcaaatgcgaacatgttagcgaccgtgctattctgcaatgccgccgacacatcagagaggacaccttcggtcaactgcacttcctcattttggaataacgaaggtgccgaattggccgtggccaccaccgtagttgctgcttctgtgagtgatgcggtcgatatcgcctgagcgagcgaagtgctcgcgaggagagtaactccccacatgcccttcatatcggaaatttagcaagacaattccaagaatcaaaaagaaagagagacagaaaagggctaacgagtcaaggcaaacgatatgaccaactccctgctaaaaatgtggacaaaagtgctgcttaaatatatcttctataggggcacgagggacccgagaacgacagagccataagagctttcgcgactatcgggcttgtggcgctatattttgattaaaatatctcggtcaatttattcttttggtgctatagccgatgcgatgaaagccattgtacactaagtgactagttgcataagttagccagctaggcgcaattatttcgcttaccaccgtctagcttcccacaaaacacaaaatcaagaaagtgctctctatttctggggtttctccgatttgattcaaagatactgacatatttggtataaaagcaatgtgttcgttcgtcaaatcagttttctgatacctttagtttaagtgaggccgattttggcccccaatatagttccccagcctaggccctaagtctttacatgaaacttgactaacttgattgcattgaattataatagctcgtaagccatacgctagtctattgcaaggctccacgaccgcaactaggcatataatatagagaagacggcctaattggatcacaattactccgcacccgaggccttactgtgtgctcagtaagcttcacagggataaaagggcgtgcgaaagttactttctcgggcgatgcagtttaatatatgcgagtgagagtttgatgccggttgcagggatgttgcttatacttaatgtaaactggcgcactgcccagctgagtcggattcttcttgtcaaaacaaaaggtgacgggcgctgcttttttgtctacgagatgattactaggcgagattatgggttctaatgataacttgcaatcgcaggccatcggcctgatctttgcctttccgtgcttcgctagtgcagctgtggctctacggctttacagccgcacgttgacgaaatcgtttgccgcaggtcagttcaatgatccaattcctcttcgtttgtgggttccatgaaattaatagagaatagatgactgggttatttgtctcgcgatagtgagtaccgcaaccactctaagaaagtgcccggaggattgacagaggcagatcatgtattgggcagagacatttacgtcttataaaggtaggatatgaacagcaaggatactccagcgcatatataactcatgaagctaatcatctcttagtgatcatttatacatacattggatataacgtctgggatataccgaatgactatcccgccattctcggcagcaaatatacctacgcggtgggtggaatatatcctttctcagcatatttgttcccgcttgctaacgaaatagaccgaactcctctacaatcccattttagccctcgtcaagacctccatcctactcttcctgcttcgtctaaccggccagaaacactcagtacgcctggccatctggggtctcttaattttcaacggtatcgccgccatcactacattctttatcactgttctgcattgcatcccagttgccgctaattgggatgcggcttcatatcccaatgcgaaatgtcttgactttgcaaacttcgtcaccggcacgggctcagtttccattctcacggatatccttgccttaatactacccacctggatcgtatatcgtctgcagatgcaacggagacagaagttgatgctgattggcattctgtccttgggtcttctgtgagtagctcaaccgaacgtcttctttcctcatcaatctgatactaataaataaagaactgtggcggctggcattatacgactcattctccttgatcatttcgaccgtcatatgccggagaattacacgcactcggtcctcttttgtgtgtccactatcgaagttggattatcgtttatcgctgcatgtgctccctcgtttaagccgctcgttacccggctggtcccgaagctcttcggctccagccgcaccggccgggataacnnnnnnnnnnnnnnnnnnnnnnnnnnnnnnnnnnnnnnnnnnnnnnnnnnnnnnnnnnnnnnnnnnnnnnnnnnnnnnnnnnnnnnnnnnnnnnnnnnnnnnnnnnnnnnnnnnnnnnnnnnnnnnnnnnnnnnnnnnnnnnnnnnnnnnctcttcgcccccagccgcaccggccggtataacagctccagtaaccggttgggctacaacctcgaggacacgtcaaacttcacacgccgtacgcacgaccagaccgtcatcgttgaagctggagatggcgagatcggccacagtcacacgaaattgaaagccgataatgcgatcaccatgaccacggaaatggaggttacgtggggtcggtctaattgcgaggagcaggataccagcagtacggagagtcttgtctacggaaaggggagtagcaggcgttcgaaatgagtttggaagaatattgctttatttgttccatagatgtactctggctcgattaaaatatacgactgtaagaatgaagcttcttgagctgtgtaggttgtaatagttgcaaccgaccatcaatacaactggcagaaagggggacataccgctttcatagcgaccgccttcgagcggggtctatctttcgaggccatcccagaaatagtaaacatccatcagtggttttacgcattggataagtttcccatcagaactgagaagcgtctcgtctgagttcgtatcatcgaatcaagagcacaatccagtccctcttctcctcagctcggagttgtttctggtcgggtgtgcaccctggtcgtctgcggaaggagtgctgatccactgtgggtgtgggtcagactccggtctgagaccactctttagatagaggtaggctgtgtgaatataagacccattacctacatatatgtatcatgtatgtagccacaacattgatggaaagaccaagggttgccagcatagtattccaaaagtgctgggcaataatgctgcgctacctaagccataaaagctggagagacctagacaaaaatgcatcatttgatgtcattagtagtaaataacttacctaccaaaatagttaatcttgtgcctgctgctatcataggaacaaatgctgcctgtgtcttgcatgagatggtatctgtgacaaaatagaccagcagcattagctcaggctccaacctgcacctagccagaagtggctttcacagctgccaactcccgccacaaactagtttgcttgtagcaaaaagtacaatgccgcgaggttcaaaccaaccattctcatcatttttacccatgctgaatcaacatggccactctcgaatctctcaagtgtgctcttaggcaaaaggccaccgcaacggggtcatccccgaatcagccattatcagacatccagtacaacgctggcctcgatatcttactgcagggtccaacataccaagacttcatcatccctcagatctctcggctgctcgctcctctcttggactcgaatatccagatatcggtgctagaaataggacccggctcaaagagcgtatttggatatctgtctggtcgtctgaggcggaaaatcaggaaatacactgcattcgagcccaatggcctgcttgctacagggttggaaaaatggctttgctcgaaatcagaggcagagtccccgctgccctgtctggaaagctcgcctgatgtccagcgaattctattcggtgtagagagcgacacgaatagtactgatacgcgtgacaaggacgaaaagtttgatgttatcctatcttgtcacggcatgcatgacatgatgccaaaaaccaggttcatcggacaagcgctagaaatgctggttaagcaacccgaaggaggaatggtggtgatttttcatcgcgacttgaccctacacctcgacggattagcgtgccatcgtaccgcttgttttcctatgggagctgttcgcgtggctaatagtgatgagatactggattcttttgctcctttcatcgcagggtttgccatgcgggatgtggaggcggacaaggatacccgaattgaatggcgtgaggtgtgccgcgccttgggccgctcggaggctcacccagaccatctattattcagctcgcccaatatcatgtcggccttcacccaccatgcgaccgcattgccggagctgacagcacaggtgccattgttggaaggaggcaaagctgttaagaaccgagaggctcgtcttcaccaccccgcctcgactgttaggccgacagaggtacgacaaattcagcagtgtgttaaatgggctctgaagcacggtgctaatttgaccgtcgttggcgggggtcacagcggccactgcctatgtcccaacgtcgtttcggtcgacatgagcgcctttgaacaagtgcatattatcacagccgaggatagtggactagaatctggtcttgattctgttcccttggttgtcgccgaggcgggctgcaaggtaggggatattgtccgcaagaccatggcagccggcatgacagtgcccttaggggcccgcccaagtgtaggcgcggggctatggctacaaggcggcatcgggcacctggctaggatatatgggctcgcgtgtgacgccatcgtcggtgccgtgatggtcagcgtcgactctagccaagccttttgcatcggccgtgtaccaagccaacactggccggccggtgccgtgcgcccagaaaacgaagccgatctgttatgggcgataaaaggcgctggaaccaacttcggtatcgtagtcagcgttactttccaggcttacgcggctccgatgttctcgattcgaaattgggttgtcccgctgagtgacaatctcgaagcgcagggcaggctcagcaattttgataaattagtcgcgaggcttcctcggaactattctatggacgcatatctgtattgggacctcggaaagttgcatcttggcgtgaccatgtttgaatcttccacgaacgggcgcacctctggaacatccatctccacgcccacgccagcagcaacacttttcgagcgggaagacaaatttcaagtcgtggactgcgtcggcttgtttgacgccgatatgtacatgtccggaatgcacagtgggcagaccagcaccaatacatcagcattcaagcgatgtttattcttaaaaagtattggcgtaatgaatgtcgccaaaatattgctggcagccgttgagactcgccccacgccactgtgctatctccatctgctacaaggtggcggagctatcagtgacgtggcggccgatgcgactgctttcggttgtcgagactgggactttgcctgcgtgatcactggcgtctggccacgcgaccaagatggaaccgaagtcgcacaagccgccgtacggtgggtatataaggtcgctagcgacttgttgcccacgagtagcggagtttacggcgcagacctggggccggaccctagagacgccgcgctggcggccaaggcttttggatcgaaccggccacgcctggctcgcctcaagcgcagctcggatccgcataatgtgctagcttacacctgcccgcttcctaaagcgcccatagaacataagcttgtcattctagtcacaggtgtaagcggcgccggtaaggattattgcgccgacatctgggtctcggtattccttgaacacacccagaaaatgattatggcgcgcgcagtcagcattagcgatgcgaccaagcgagaatacgcggcggccactggtgccgacttcaaccgcctgcttcaagaccgtggctataaagaggaacatcggccagcgttgacagcgttcttccagaaccaagtgcgacatcgacctcggttgccagaggagcattttctaaatgtggtaaacggtgccggagacgtacatgtgctgctaatcaccggaatgagagatgaggcgccagttgcagccttctcgcctttggtgccaggcagcagactgctcgaggtccgggtgaacagtagcaaagcggcacggcttgcccgccgaggctgccatggcggtgattctgatcatggtgacaaagagaatggcagccgccctggcctcgtcttcaataatgacgcgaccggaaacgacgcggccagaaggtttgccgaagaatacctgattcgcttcatcgatggagacctccagcgactagccaacatggtgcgtccagtacctgactttccacgcccgggcgttgaattccgccatgtgctcaacatctgccagcagccgggtgggctagccctgtgcacctctctgctacagactcacttcactggtgaatgggccaaggttgacgtgatagtgagttgtgagaccggcggcttcatctatgcgtcggcgttggcctcgcgggttgatgtgcctttggtgctgattcgggaagcagggaaactgccgccacccaccgtttccgtcctcaagtctacttcgcatatctcttcgacatccagttcaaatgagaataggattgagatagaacaggatttgatccctagaggtgcttcggtagtggttgtggatgatgtgctctccacggggaatacactctgtgcggtgctacagctcctaggtgaagttggcatcgctgatgtcagcgttatggtcgtggctgagttccctgttcatcgcggtcgggaagggttgcgccagcgtggatttggcgtcaatgtccaaagccttttggtgtttgacggcgcctaggaaaggcgagaatgttggaatgtggaatgcagattgttcttctgctaattgaattttgctaaatttgctagtttgatctacaacatcctaatcgtcttattctctcgatgccttgacaagtcaattgacataatttctatctaatcactggtagatcatcgttggaatagtgcgtaatatgtgaatgttgtggttgtgctccaactgtttaccacgggggtcgtgagctaccatctccgtgactccgctactccgcagttgatcagcatcttcaacaactcaaccatgtacgactcctatcgtcagtatttccatcatgctcacttgtatatatgcaaatagctaacactgttctaggtccccaccctctccttgcccaggtcccactgaccgtttcacccttcatcaacctccccacctccgtcacattaccctacacgtacaaatctgttccctcgtctctacccccgtcagtgacaatcgatccaaacagcccggatggtaaggcccggtatgtcgtctccccaagcggtgagcacgcagctcatccagacgatgtcctcgccgcatgccactccctcgaacaacatttgaatcaggctcgcgccaacgcggagcaagcgatcaacacatggaaagaggctataaaacaacgcgagctagcggaaaagagacgcctcgctcctgggtggctcgaccgcgaggaaaagctccttcagcctagccggaccaatacctcccctgacgcaaatggcgatgcccctacaagccttttggatagttcttcccctgaccagggctcttcgcagttaccgactatggttccgcacaacgatggggaggagctagatagggcgttcggtggtctaggtgtgaaatgaggaaggatggtcttgcaagagagttaatccctcattgctctttacatcacaggagtgcttgggaaccgaattctcaatgtggcacagtggatcactctctaaaataatgtctctatacactatgtttcgggcggacttccagcgctgggctcttcgaaggccttgtcaaacagtttataatctcccaagtccgcgacatgcgcttcgccgtggtgctagcgggactttgactgtcagtgctaagattatgttgtgctagaagagtcgagtggatagggtgaatgatttcacaattgttcctttgactagctacctatggactatcatctggaggcagttattgctatgaaaatatggtatatcatgtattcaggatctggcaataatgctgcatataagattcctatatgcgaatgatcaaatacaactgtgtgtttaacaaaagtgcttctgacgctggttatatatatctaccaggtgagttcctatttcttgctttttctttcttatgccgatcatcttgaataagtactcttcttaagatcttgctcgtcacaatagcatctatattaagatgaacttggtatctgtatctcgtctacgccttcacgccctcggtttacttcctgcgataagggtgacttatctttatcaggagttaccatagtaactgtatacaccgtatatttgttaaattatatagacaaattggcagaaaggctagtgagtgtgctgatccacgcggtgtctggcaacaatcccaactgcggctcataagctcgcggaaaagctccaccccgcgcgccggaagctctttttcattccatcatctcgtcatatcattcaatcaattttctccctctttacaattaaacacagactccaacatggaggtcattcgcagctcccccgaagcctcctccttcgtgccactggctgaacaccagtcgcgcaccccgagctccttctactccggacccccagtattgtactaccacagccagcgctgcaagatcgtcattctcgagcgcgagctactcgccgccccagcactgaatgccctgcgcggccaggaagctaccaacaacgccgccctaagccatgaccagcaggacggcgacgagaaggagatcgcaatctcaggcgtggatacctgggtaacatccgagtgagtttagtctattaattttccctcccatccgaaaaccaggacaccaactgactaattccatcacccaacagcaagttcctgctcttctcccccgcagcatcaacgggcgtgtcgatcccctacccctcgatctccctgcatgcactccaacgcctacgcgtcccagactccgatgccgaagtccagggcctgtacatgcaggtcgcgacgccggatgcgggtgcgccctctgccgacgacgaagaggaatgtctcacaatgacagtggtgctgcccgccgacgccgcgctagcagagcccgtggagcgggagacggacacacccacgcagcagctttacgacgctgtctcggcgtgctccaacctacacccggatcctcttgaccagggcgacgaggatgatggggatgggcctcggttcgtttcggcggaggagcacgatggtgtcttccagcttggaaatggtggtttgcctccgcctgttgatggcagctctgggtggatcactgcggacaatatggatcagttctttgatgcagatgggaattggattgctgctggtgagccgccttctttcccgcttgggcctggcgctgggactgttcgggctcgggagggcgagaatggagtcgaagagaatggtgttgaggatgagacgaagtggcgcaagacggattgattgtgatcagactgttttaaggaagatatgagataccgcaggattggcgttcaaattacttgagtagttacatagtaggctaccaattcattttactaagggtcattattccaaggatacattcgtacatagggaagggttggattggatttctactaataatttcgtctttctttcatgaatattaacctcataaaacacacaccaaacataaagacagaagaaaagggcagaacatgaggcgacaagcaaaataagaagtaatagaacaaataaaaacaggtagaagaaaatgaccccgaagcttttgcgccagtatcaggtactgcacagtaaaaagaaatcaaaacaaatcaaaagaaaactgtcgctttcaaagtccacaaaagacagcaggattaatctattcccgtaggaatccatcgccatcgtaaaggctagcaggtgtggcagttccaattcccagtccgagccctttaccagtaggagtagtcatgcctcggcggggagaagtaggagtggggggtgtatggtggctcgacatgtgaggcggtagttgttggttggttggcatggaacggggtgcaccgttcttgccacgggtaggggaggagttaggcgtgcggaacgacccaattgggggctgcatgggggttcgaggataggaggtgggctggttagaatcctcaaagatagtgacgtggtcttggaccattgaggaccggcgggggccgtagaatggagaagcaccaataggacccagcccgtcatccaggcgagatattgaagcacgatcttggcggaatgcgcgatccggagaaccgttgctcatgcgttggtgtgagtctgtggatctccgccagtcactaccttctgttcctgtgatactcatgacgaaagggaggcggctgggagaggccaaggggctgtctagcgtatgatgggaggatgctaaggaaatgcaagttgactgccttcgagctggactgacgccgggttggttccgaggcccctttactgctgaccgtcgtgggctgccaatgccaagagagttttcgtggtatggctcggggagctcccatacagggggcactctttcgggagagggagtgttggtgagagaggtgccgtgagacgaagggagagatgtgaacagttcagggagagcgcgagtgtttgcgaatggagacttattggccatggaagatgaaacacggtttctcttcttgcaaggactgtcatcgtacattggacgctgcggctcctcgaccagtggcccgagggagcctagactgggcttgccatgtcgactgccgtacttgctgcgccttgaagaggacagaggggatgctgcacttggtggcaacgaatgcatgggttttgttggggtgttgattgagatctcacggagatccagctcctccatcttgtcgaagtcttctggttcctcttcgacagtgggagaaaacgtcgatgacccaaatgtcatgggtggatggatagagatacggacacagttttgacgtcggtgacctttgcgttgtggatttccacccttgagtgcagagggaagattgccctttagagagagactggtacgctgcatcggacttggtggcttggtgttgcctggtgatctcacctgatggaacaaagtcccgcccccgggtgagccaacgtagaaggggtcattatccatttcgaaattatcgtagccgatgctgtttcggaactgattgccgtatgggacagaggatatgtgggagcccgatgatcgccaggacgagactgaattttgatgtcccaaacgcccaaccgtcccagaccgcaaggaagcatgtcttgaagggggatgaaatgaagacatagagtcagtccgacgtggagcaccaccaaaacggtcgatggaggcgcccgagtggtgagtcgtcaaacttcgtcgaggtgacgggcacacagatttatggcgaggttcagttgtcgaagaggagcggatagggaagttgtgcataggcgggatggaggtgtttgtggcaataaagctcctccggccatccttaaccccaacgtcggcagcactgaaaggtacaaacgtgccagagggcaatacgggtgaggtctgatcggtgtcagccgacctagaaccagttctgccgtcatccaaaattgagctattggtggtatccagactcatagaggaaagtctcatcacagagtcattcctagcatagctgaatctgtctggagggtatgcagttggtggaggaggaggtaccgggtgaccaggcatcatcccggcagtttgactagcaatacttcccccgcgaacacgactaggagaatcttcaatgttgtttgaattcaacatgccagacgagttacggtcttttgaaacaggaaatagacctgactgctctcgtactggagggggtttcacacctagatggaacccagcttcatcctcgttgagatctggcgtttgtgttggggttctttctgctggcaattccagaatcccttcgaccgccgaaagtgggacgtcttctttcgatattgatattgatgctttaggtggtgggctcggaagatcgttcgattcactcaatgtggccaacgagctcatgcgtttgtgagacaatcgtgataggcgcttggaacgagatcgagaaagggaattgcggaaagatcgtgctttctcggtgaccggtaaagaagattccgagtcatttttcagacgaagcaaactttctctcgacgttaattgtccccattccgacggtttaccatatggaagctgcccatgtgcccttaagacgcttccctctgcccggctcagttcagtcaaggtatccacctggcaagattgcaagcgactgcgtggtctctgcgtaaagcccaccagtcgtattgcatggcgctccttgcgatacctgacccagacaacaacgctgaccactgaaacggcaatgaagacggccgcactacaagcggctatcgcaatgacggcgggcagcgccagcatgctcgcctgctaaagtgtaactgggctgattccgatgctgtatggacacaataagggggtgtggtctttagaattcctcatccgtgaatagaggattggtcgtcaacatgcgatgtcgcgaagtatcgctatatcaaaacggccacaacgaggcttcacagactcctcatggaacacaacaaagtctcacaggaataagaaacaacgaagtttactggcattccatcaagggagcgccaattgttatgggaacattgattctagccgaggaatgctaattcatcaccaccgggtgcaaagaatgttggcggccacactacccccttcgaccatgtttcaacatggacagcgccacgaatataatcatgccagtagggcatctgaagaccagtatttggtggtgggaatgtatttctaatgcctccaaccctggtttatacttgacaagaacttatcgctcttccaagtaccctcttcctaccttttctttgacatctctgttcgatggaatctagggtgccttttcagacatatttgtcataactacagagtagataaatggctcacgcacccatgaaagtgttcaaccatgacgcgttccactggtcgcctttgacgatatttacgaccaaccaacaatatcagtgcgcccttggtcaacgctattattgttcggataagtgatctattttgattccgaccgagtggcttcggcagtcccggattatatatattaatggtataccggttggattgtagagtgatcatgcattggataatcaccccgtggacaaatggccaggttcagttggttcctactgatagcagagcttcgaatcttcacagtttccaatcattgccagaaaagctagttcaagcatctgtactccgtactcctgtccgcgatcgggagtcggaatggaggacctcggcatcttggccattccccagaagaagggtcaagtcagtaatatttaagagattgatcttctatagctggaacgatatgtttcgatgcgattccaattgtatatctctaggggaagtgcagagtggagatcccacgtcgcatttccccgccggatatgcccaggtgggaatagcctctccaatctttaatagacctgaccgtgttgaacaggtctacctaacagcagagagttatgatagatcccattatatcctgtcaaatgacgactctgaatagtgtcattatccactatgtacaggaactagcgccattgaggcacaatgcgaggatccccaccaaggtctatacatagtagtgaatagccccgccagcacgtcgctcaccgtgtatcagttagggattccttgatttgcccctcacaggctctctatttaagtgctcccccgagcttgctattttccccttcccttttctcatcttctctctatctactcttcgtttgctacaatggctgctaaccctgtgactaaaaatggactctttgtccacaacaataccactgctcctgagcattccaacctcatgggcatgttctctctcaagggaaagactgccattgttaccggtgctggcgctggtatcggtctagccgttgctcagggtctggccgaggccggtgcaaatgtggccctgtggtataatagcaaccctaagtgcattgaaagggctgccgagatcgccgagcagtacggtgttcagagcgcgtagaatttccgcaatgtgattggttttatatcattctaacaagatttattttgcagccaaggcttatcaggttcaggttaccgacgcaaaggctgtcgagaacgccgtgaacgacgttgtcaaagaattcaatggccgtctcgacgtttttattgctaacgccggtattccatggactcagggccccatggtcgacggtcccctcacccactaccgcgatgtaatctccactgatctcgacggtactttttactgtgccagggccgccgctgagcactggcgccgccagaaggaagaaggaaccgatgccaacggtaacaaactcaccaacttcacatacggcagcttcgttgctactgcctctatgagcggtcatatcgtcaacttcccccagatgcaggctgcctataatgccgctaaggttgcggtcattcatctttgtaagttgttattcagactagatgggctccgtcgctctactaacgcctttccaggcaagtctcttgctgtcgaatgggtccgctttgctcgcgccaactccgtatcccccggttacattgcgactgagatctccaactttgtggctgaagacaccaagaatatctggcgcgataagatcccgatgggccgtgaaggccaagcccaggaactgaagggtgcctacctctaccttgcctccgatgcttccagctacaccaccggtgccgatatcatcgttgacgggggctactgcgcaccttaaacccgaattaaaagcagggtctttcgtatgaagcatgaattttggacagcgatttgatttgaatgtgatgatagacgaacgtaacgatgaacagtttagatggacgagtctgaatcaaaatattttatttgcaacatccccctcatcatgtctagaatgactcgcccggtaaaatggtgccagcgatgccagatcccgacggatgcattttcccatcaccggcacgaccagtccatttctgcttgtgcgcgattgccgagccaatgacgctatgagactatgccgtccttgtgggaataatggctcaatccctgcatggcgttgattaaccccaccaatgtcatctggaatgcgctctacccccgcgtgacagcgctcatacaacatagaccgatatgaccctgtcggttgctctgatcaaaacacctacgagctacgaaataaacagcaacatgaatgtaactatcaccaggggtaaaataactcttctttcttaaacatcaacttcaattacgacacaggaaagtagtatcatcgctccgctcatcatgcgctcggacattccgccaagcctttggatgctgtacggagtatctgtcctgcaaagcctcatatgctcactagccccttattcgtcaagctcgggagtaacataggcgaagattccctgggatgtccactcgacaacctcatccaaccaaaccaccggtcccccttgttccgggtgctcaacgttaaaatagggacgttcgacttggaattcccagatggggatatcgtcgactgggtagtgttcgtcatcggagtcggaccagtcagagccatactcatcggagtcatactcttcggagccataatcgtcgacagacccggggggtggactgaccgtggagaactgggctctatccgcaaagttggggtgctgcggacggtttgagtctctcaaattgggactgccacttccaatgtcgtcatcgctttctgcgattctattggctgtgtcaagaacattgttttcgccgggtcgatgatggttgcgtgctggagtcgccaggtgaggatgttgttcgtcttcatcgttgggatcggggttgattggctcgtactctgccaaaggtatgcggtcttggtcttgattgacatgattacggttgaagagattgcgtgcaataaattggtacacagggaggatgatgcgacgatggcaggcacctaggtgctgcatgatcgaagcattgtagacggcaacgacgaacaggaatgagagtgtcaggcaaatcgccggaaaggcaagagaagcctctgccatgatgactttgttgattgcagatgtccgtagagccgaacagacgatatggaagatgaaaaatgcatatggatttggggaggaaaaagggaagaagcaccgcgcgacgaaggtcatcaaaatcgacatctaacaactactgtgaattgatgaacaataggctgatgggattttcaaactgccagagaatatctagatatattcaataacaagatttaactattttcattagttgcatctactcttgcatctgcttatctatacaaagtgatatcaataagcaataagatggcaaatccttatactcgatcactgacatcaacatataggtatccaagttacattgcaaaagtatcatagagcaaacttctagtttcacaagtattacttgacccgatgatctcctagagtcacaatattcattcacgatactcagtcacgccgcagcttaattggcgactttcccatatgaccttgcacgcccacacgtcataagcaaatcttgcttatgaatcatataggaaagccagctcgacatttcctatatttagattggtgctacagctctcctatcaacgttagctcaagcataggatacatatctaggtatctcattgtgcagtgagactttcaccattcattgtttactactctactttctttctttggctcaaatcgatgggcttgaaactaagcatctttgtttatcctgatttaaattagaatcatggaatccattgtttcctctcttcctttgtccatgacgttgacacaaaggcctttcatgcattgtataagtgcatgccaaactgcatcatccttccctcccatcttttccacctctcaatcagatcacaaatttctacatatacattactccaatcatcccgttgaccttactaggtgtgttctcatacagccatctacaatgggaattccaacacgaggagataagaaccgaattgttaagcgcaagttcacaccaagaaaaacctggacagaagctgttaaggaggatattgtacagttcttcatttccaagccactcatatacggtccatttgctgataagtccaagtcgccgcaaagtgccgctctacaggatgcgctccaatgcactcaatgccgagatctgcatattattccatatatgatgagtgcggatattgctgcaggctcgtatatcatatcggaatacccacctttcttcgccagcaaaattgcatcggatgattgtatatctcccctggacacaaacatggcagcccaccaaaataacgatgagacattttgggaagacattaccccaacccagcaacagcgctactacgacaagatcgataccattctcaagaaggcagaggccgagtcaggcaagccaatagatgaagccaccgttcttttcgcccactaccaagtggacttccacatccgccaacactaccttgccccccgaagtattctgaatttatgccgctcaaaggatgatattcgagcgctgacccactggcaatggaagagcgctgtatcagataaaacagcctttgcaggatgccccgactggggcgtgggatgggtgcatgagccgagcaattctataggccagcagattgcagcttggcgtatgggggaacgaaggcgagagaaacatctcgcggaagtgcaggcccggtgggctgagatcagagatgagcgacagaaacagaggacgaggacaataaatattttgttccagggcgcgcatgttaggacttacaagtatgagccatgtggaccgtgtctgacggaggaaaagattgtggacattacaagggaaaggggtgagcattatgaagccttttggaagttatatgacgagtgagggactcattgaatgctattatatacgtattgggttgtttgtttaaagaaaatacaaaatcctttgttcctcctcagtggcgtctttccaagggtcttttttagatggatgttgaagccttttctgggtaattttctgacctttcaattcgtacaataacggccagagaggaatctgaagtcgttttggatatttgttaagtatgtttattttgtctctttcaagtcgaactaagcaagtggcgttctaccaagcaaaaaacaaacaaacaaatagaaaatctatctgaaagacaaggaaggcagtttgaagcgcactcgcccacaatccagggaacgggcgtctccatgccaatgttgttgaccgtctctagagcagacatacccaccaactgcctcacttagcctatatctgaggaacattttcactggcgctgtttcctcgtccgtgaaactccaaagctgcgagtattgtaagactatctcctgaccgtcatccgaggcttgaataatcctccctagcttttcgcccatgaaggacgagactagaacctatacaaatgttagttatcatcaaactgcagagtccgtgaacacccacaggatgaaactggcattcgatgaatggtctatgattcactcgacggatgaaggtggaaacgatggctttcaactcgtgtatagtgattccccgatttgtattggtgggacgaacattagagatacatgtcatgaccagatgtggcttgcgagggcgatcaatgtatcgatattgattcatcactcgccaccattttcgaagcgggtcgtttagactgttcacgaaaggaggatcgccatttttttaatgtgggctatgagttgtcagtttcatcttgaagtgtagaagcatatggaattgcttgcagcctacttacctccaatgttcctgctttctgggaggttcaagaatgaagaaacgggatggcccttaccttggtattgtcatatggcagtcaatgatcttctctgtctgcctggcttgggccaacgcatcattcaccatttcatacctattaatgtcataccgatgcagattcgcaaatgttggagcaacttcaggtgagtagtcaatgtcagaatcattcatgatatcttgtacgctaggaataggagacagtctcagaaattcttcctgttcctgcacgtcaggccggggaggatagagttgaaggagtctatcagggtgaggctgaaagaaggacgggctaaattgaaaagttccgcatttatctggatctaagagcacttcaaatgcttggatgccaagcgcataaaggtattcaggagaagggaagtcaggctcaaagtattcaatgcaccgaaataaagacctgagaaatttatgaggctgaggctgtgcttcggccatgttgacgaagtggagtgaggtgtttaaagaagtaatggaccgaaggaatgatgagagaatgggcggcgtaacattttagaaaccctggaacttacggtagaaggtcttccaatgttgaatgttaaggggattgtaccgccgacccccccttggccgttccgatcccctttggccaattcgaccatcagctatttctgccatttcttgaattttctgcaggtttgaattcttgtttatatagtaaaagatgtacctttctactcacgattttatacttctttcttcaatttgaatgcctaaggtctacaagctgtatgttgaaggccttgaaatataagaagtcactcttaacttactgtgatgcgtcacgtcacgtggtacatcccttgtatatcacgtgcaaagagagaagaataactaagatatagagaagaagtaagtaggaagtgttacgagccaattcgattcagaagaaaagagtgcaattcagaccaaattctaagtacgaagaagaaagggagaaagagaaactatctgagtgtatctgagtgcgcgttcttcccttcttatacccttgcgtttgtcttcgcttaatttcgtccgaccacttaggaaggtacaaggacatagtcgttccttcctcgtttggcaagtacgaaaacgtgaccgttcctgcctcgtttggcaagtacgatccttcccagatcgtcacaggaagtagcctaagtatatagtcgaccctttgcaaaccttgcaaactttgagccttctcgcttagcaatctagcaaatatacaaacagcaataagtcagtaaatatgcaaatcgtcggaaaagcggccaggaagacggtggacgtttatagtaggcggtcagtctatgtacgaattatcaggcaggttggattggccaaaggggggtcggaacggccaaggggggggggggtcgatggtacaatcctatgtctattttgtcctgattaatatggtgggccagggcgttcaacatggttgagggagctctgggaaacccggaatcctcaaatagtggccttgtttttcgagcagggagaaaatctcggagccttcatgtcaggtagaatcctagaggagagaagatagaccatgcaccactcacggaatgaaagggagttttcaagatgctgttacattaggatataaggactctcgtcttgtctgctaggattgactgcccatcgtgcatatccctcttcggtatctatatttctgtctctacggtcaggaagtgcgtcaggccgttcctgccccgtttggcaagtacgatccttcccagatcgtcacaagggccaccagaagccgggccatcagccgtctggtctaattaacgattaacacttccattgacatggtcacacaacgataggtgcaatgcagcaataagcagaattatgtaacaggctcataacagacaggcttttacgcagacaggctttcacgcaggcaggcttcgacataaagagctcgggcatagtgggcgtccactctggaggtggaggcataataatgcaatgtactgaagggagagatggaggatgcggcttaccgatcgagcgggtgggcgcagggcctaatatatagtaattagtattagctcctgataggtgaatctgaccaagtcttttgctcaaggaccaactcaccctctttgctagagcctctgcctcctgctggaggtctttggtagtggcgggggcagagcctggttgagactaatgagcatatggtccaattgcccttttcgagctcgtcacggctggcctcttgggcctggcgcttgttctgtaccaacgaagccccaaatcaatatgattcattggatagcagtcaggaataattttactgggcgcacgggaggcccgagctggaatgcccggcgaaggcagacgcccaccaggcatacacccatactggcaagccagtaacaattctccacagtatgatcactgcgacggcagtgtgtacagaacagctagatcatatattaccgcatattccaacgatacatcaatacgtgcattgtatttggagctgggatgaggagaggtaattgttcaacacttactagaggaggaggatggaggggcattcgccatgctagcgaatgagcgtaggaccagatgttgttttcttttttaagaaaacactgggagcgaccgaaaaaaaaaaaaaaaccttgcagaaacagagtagagggaagattacaaggataggttggtttgttgggtgtccctgcttttatatgccaaggacttcactatgagtgggaacgacaggtcaatttctaagatgatgagacctctatgtctacctatataagaagcttgtcgatttcgccaagactcctggcattgatctatgtttatacaggaactcagtggcagtaatttaaagaaaagctacattctagtcagcgtagaatagcatcaagtcatcgcgagtgtcaaccaagcaataacaaaatagatatttcaaggattatttgttataatgactttccatagaaggtatgccgacctctccaagtgagcctacaacatatatgctcacgtgcagtataatcttgccacatggaagacctaatttagactagcaacggctgagacgaaagcagcccgagtccaacccggggttgatctgctatgaggcattattggtctgcagtgcatggtattcgggaagtcaaagaggatttgacaattgaattcgcccaaatgctcctgctttactggcccttacctacttctcccattccccatactttcgccatttctttcaaccaacggcccataacgacgatcaatcttcggtgtggtgacattggtccaaaggatttcaggcctagaacatcaccatgcttaggccctctcaccatgctgcgttccccgcgaaaaataccagacggacccgagatcttctcattcagttacctctttaggaccaatccccaaactcgagcaaccttaccccaccaaatccagagattgatgcgggcgaacaacgaaagtaatgtgttccaaggctcatgaacttttgataccgtgggaaaaggaggggaaaacacgccaggtacagatcttccggttgtggctggcccctcttggctcattacaagggtatcatttgtgatccattcggaacgctcacaaggctccggtcttggggaggtcacaagcaattacaaagcccgtgtactaggtattgtagtactatccaacatataggaacccttggaattctccatatatcctcgatgattggcacaatgtcctcccacaagcccccggtttttttttgagaggcgctgcgccaccaatgaaacccaaaccatgactaatccttgccatttcgtcactctcatccacggggtggactgcgtgaaacctgacctgagagacgcagatcgggatttgtgacgtggggattcaagattctgcacggcgaacaagggggtataaaggggcctttgctagctacaagattgacgggatcttccaggtacattcgggtccgactaaagaggcagtccgtgtccgtggtctcctggtcgtctgatcagatggaaagacacatgtgtttcggttcaaatgtaccctttatgtatatacaatctgtgtatacggagtaccacacatcattattatccccattctcctttgaccgggaagccgtaacatatgacgtaacgccgccgacctattagggtttccccgaatcaccggcccgtgaaggagaaggggattccatacaaatattataccgatggaaattgataatagaaaccaaatccaagtgctttatatgtcccaaggtcactaagatatatgtaatgaacgataatgacgaagaaaaaaacttccccctcaaaacgaggggaacgacatccactgacccaccgctgcggatgagaaagtgggttgagcctttgggaatttataacgtcgtcaggtcctaaacctgttacccaatccctgctcctctttctctcttcctttttgatcttcccctccatcttcaaatcttacctatcttataacccccccaccccctactacctccattttgaataacctgaataattatgtccaccaaggttttgctcgttggagcagcgggtgaaaccggaggctctatcgccaacgggctgttggataccggtaactttgtaagctcagcttccagggctgtcaattgaccccagactaattgttttatttttcgctgaacaggaggtcatcgctcttgttcgccctatctcggcccaaaagccagctatcacgcgcctccaggaccgcggatgccagattagaaaatgcgacttgaaggccccagaggagcagctcatcgaggccttggctggtattgatgtggtgatcagctgcgtcggtcctgccgaacaacaggatcagattcctctcgccaaagcagctaaaaagaccggtgtgaagcgattcgtgccatgtggtttcatcaccgtttgcccaccgggcggtatcatgtggttgcgtgatgaggtatgaggaatgtgccacggtactttgggtcagtggactgaccaggcttttactacgcatagaaagaaatcgtctacaaccagatccgccagttatggcttccctacaccgtcgttgacgtcggctggtggtaccagctcgcctacccccgcctcccctccgggcgcgtcgactacgccatgacatccggcaacgatgagattattggtgatggcaacatgcccacagcactgaccgatttgcgagacatcggtcgctacatggcgatgatcatttccgacccccgcactttgaacaagaagatcctcgcctacaacttggtatcctcgcaaaataagatctacgagctcatggaggaactgagcgaggagaagatcgaccgaaactacgtaagtcgcacagacgctcggctccgaatcaagtcaatgtggctaaccgattttttctttttccggagcacaggttcccgaagaaaccatctgcagcagagtcgtggcagcccgacaagccagtgaaacctatcccttcgacccaatcaagttcattccgcgatacctggctgaatatcaactgtcgtggggaatccgcggcgacaacaaccccgagtacgccaagtatctcggctaccacaccacacaggacctgtaccccgatttccaaccgacagatttccgcgagtatcttgagtccgtcattcgtggctcggctaagggagtctacaccgatcgtgtgatctcacggaagcaccaacgacacttcccgcgtaccgagtccagcgattccctctacacgcgcatattccctcgcacggagtcgagcgactcgctcatgtcgcgatgaatttatgaataggaaccatttttacgtatcttgcgttacctctccacctcacccagggactgttccagacaaacgccggcccggaaccgctgccattggggaatatttgacaagacttttatgacctctctcttctccccctctgaccccattcgacggggtcatggaattcagtatgcaaccgactggtgctttttttttctggggtgtcgacacccttttgggcgtttgtgatgttatggccttttgatagacgctggctactttcggtgcctcctcgatggcttggtggcagtcctcaagagctggcatatggaatgcttctattttttgtttatgccattcaatttcgattgtcccatgaagggatttctgcatatagaaaatatatcccaatcctgatcccaatcaattgtgcctcgttctttcccatacttgcacttgcatcatcactatcctcctggctccccggggtcttcttatctgggctgtccactcgatctctgatctttgattcacgtttctggtacctaactcatttgctttacctaatcttaacagtcagggattcatacctcttttttaaaaaatatactacctataggagatgtttccgcgacgccgaccgggatctcgatcctctgcctgcgaactcggacccatcagcgtcgagccaacgataccacaaacaatcccagaaactcatcagattgaacatgccctaggcttcaccgatatatacgggtcattgacaccccgtcaaatcagcatcatcagtctgtaccctccatctcgtacggggacttgcattttaacacaggtttgcagctattggatctgcaattggaacgggcttgatggtaggtactggaagagcattgtctatgtaagattggttcattataccgagcggattccttctgtgctgaaatttgctgactccgacacaggagcggcgtacgttattcccaaaaagcttatgagcgaagatattgattcctcgtagccggcagctattataatctcctacaccatcgtcggactcgccgtttacctcgtcctttctgccttgggtgaggtgggctcttggttaccaaaaccgtataccgttgcagaccaagccgttcgattctgtcatcctgcacttggattcagcttgggctggatgtaagtcccccttcgcgatgagaattgcgtctaattgatttattactgaccgcgcccctagattttggctgaaatatgctgttgtcacaccgaatcagctcacagctgcagcgctggtagtctcttattgggtgagtgcggagcgagtcaaccccggtatctggattacggttttcctttctgtcattgtgattctcaacttcatcaatcatcgcctcccgagcagaattgagttctatgtctcttccttcaagcttgtcgtcatgctaggactcatgatactttccactgtcattgctctgggaggggggccagatcaagaccgaaaagggtttcgatattggtcgtaccatggtgctttcggccctcaccaccatcatcacgcgttgctagagaagttctacataacctgctcgacgatgtcatctgctacgtttgcgtacatcggaagcgagcgggctggcatgactcacttcccgaacgttcgtaaagctacctcgagggccatccagaatactttctatcgaatcatggttttccatcttctagcaatcacccttctcggcatgattgtcccccaggactcggtgtctgtggcattttctagcgacgccaatcacgaggctgccgcatcggcattcgttgctgctctgtatctggcaggcatctccgtgctaccggacatgttgaatgcattcatactgttattcgtcctgtcaatcgcagactacgatctctatctggcgaccaaggcaatgtgcgacctcgcagtgaagcgccgggctcctgctttcctatcacgcactacccgaagaggcgtcccgatctacgctttggcggtatgctcgtcaactgcaacattggcgtatcttaacgtccgccaagactcaactgttgtctttggatacttcgtggacatggtcaccatgctcgggcttctgacatggatttccattctcatcacccacatatcttttgtgcgagcgcgaaaggctcaaggtattcccgacaaagctctagcctttagagctcgcttcggtctgcctggaacgtgtttggctctcattctctgcttgttcatctctgtcgccattgtctttgactccttcagcttcgattcgggcgttcggacattcgacgtcaaatcttttattgcctcgtacatcagtattcctgtctacatcatcttgatggttggctacaagctcgctgttcatagtaaacacgttgaccccaaggaggctgacctatggacagataagattgagccggagattgagagaggggggggccctagctgaagggaactgcttgtcatggaagccgttattctataggtcattctggttcgtccttggggatcgaaattattggtcatttttgtttatccacggggaaaagcaattaccattcgctatattctcctgaatatgtactccacacctacatctaggtgctgactcctgcttcaacttctaacaattctcaaaataacgactcatccactatgtagtatggcgaacagcgtctcacaattattagcccgtgtgactgatctagaaagctgcaagacatcagccactatgcagctatcctcccgaatcctcgacatgtaagatgtacaattgtcacagtgacaggccaggtggagacgctaataacatctacccggagttggcgcggataaacagttcttctgcacagcgaccagccgtggcctactccatggagtaggttgaacttcaattgacgagtcaagacattctactgatataagacgctcgtctcctcaagtcctcaatcctcaattctgattcttgggagactctgtataaggaaacccgatgcatctgcggtttgtttaccccaccatgcaatgcgctcgcatgagactgacaagaacccccagacgctgttgaatcttgtcatttcatcttttatctaacactccaacacaacaccgccaatttcgtttcctttgaatgggagctcctgtgctctacattccgatgaacatggaccaccatcccactaccccacaacaccagaaagaggatttccgcacttttatcaccagactcaacatcaaatttagcctcgagattcccctccctggaattgagtctccttcggcgcgggagagaaacaccagcctccctagtcagatctacaagcacatccgcccgctgttcttcaataacaaggttgacaagaaaagcctaattgacaatctcgaggaatgggtccgcgggaacctgccggccgcccagaaccagaaccagaaccggaatcatgtttatcaaacccatgcaggtcgccgagccagccaacgacaccacagcgaggaaccggcgcctccgatctcgctcaccggccctgagaaggataggtgcatgaggcagctactagtgctcatggaagatgaggaatatctgttagcgaatggccgtgtcgtaaacacgaaaaaaaggttagccgctaattcttttggaggtgccaaggagttatcattaaaaaaaaaaaggtttgatgatgatgaagacgtggagttccataccgcgccgagttcccctgtgaaggggtctgtgctggctcagtcgccgctggggaagaatgcggatgggagtttgcaattccctgagatggtgcaggctgcctttcgagggccgaaggagaattatggagctacggtcaataatcgtcgtgtaattcaatctcctgcgtggggatcgggaggaatcgcatcgccgacgaaaattcaagttcacccgtcgcctacaaagaaggatggaccgattcagtcgccgggacataataaagagaattttcattctccggcgaagtattcggggacttttcctccgccagcaaaggcgcaaccggtacatacacaccaaccgctccctaagagagcggccactaaacaaccatccaagccccaaggcaatattccccctcctagggaattgacgagcactttgtcgccagcgaagactgcagggggtgcgcaaccatccgcgaagaacccaggatctgtcttgtcgccatccaaaacctctaaaacccccaaatcggtcaaatcaccctcccaatcgccattgaagcagatggatcttcgatcgtttgggtttggcaacagccccagtaaagaaacttctcctccccgggaagatatcgaattcaaaagaccttctttatttgaaaagcttagcgcggtatccgatgaatcgaagcgcaacaatatgacggagtcacctgctcccagctttgcagcgactacttcgtcggtctttatgtctcgcgatagtagcatgatgcaatcattcgatactgtcgcaacagaaatgaccgagccaatggatacccaatcaacctatgcagactcgattgtcgggtatatggctagcgaagagatgcaaagaagcgtggatgctgctgctatctccatgatggtagctgccgatcccgccgagacggagtatgccctgaaacaagagtttattggtgagctgttgtcctacggcccgttttcgggagaagaatccttctcggcgaaaatcccattgcgattccgatatgagctggaacgtatcggacgtgcgtggggaattcccttcaaacagatactcgttggcgaccgtgttaccttcaacactcaagatgatttctggtcatgggtcgccgggcttggtcgacgttatggtcatccgctgccagagaaatcgccccgtcgggcctgggatgctgctgttggtgatttcaaatcagataagcactcggaggtggtcatactctcaggagatttggactggtgtgacgacaccgagtcgggtattttcaaattgagacttaacccgctcaagccagagcggacgtgtcggttccaccgaagatttggttcggatagattcctgactcttaccattccagccgctgatcggcctcccagccatcagaaacagcctgcttacccatctgtccttcgcgagagtattgctacctggctcacgcggaatgatcatcattgcctcggaaggacgtggcgggctttctatgtcgaggaaataaagaccaagcgaaaagtcaaggctgagcctcggttccgggtcgagttcttcgctattgatggcgaagacttcgttcatgggctccgtttaccaatggtggcccctccccgacagcaaagtgataactatactccgatgagtgtagacgctttgctggaatggcatatgcccaagactgcgaatgcgaatcaaagcaactgcaagctcttccagcgtatctctcttggtttgtcgaagacatttgcgacggtcaagttaaagccgacgcaagtgcttcgtttgagagacgatccaacccgggctgttatgaatgatggatgtgctttgatgtcgaggactcttgcgaaccaaatctgtgaccaactgggcataaccaccgccacacctagttgtttccagggcagaatagcaggcgccaagggcctttggatggttgattcccacagatctagtatctctactgtgaacgatgatgatatctggattcagatctcggactcgcagttgaaaatacacccccatccggaggaatggattgaagtggacgatgacccccatccgcaggaatggattaaagtggacgatgagaagttgaccttcgaagtagtcaactgggctaagccgttgcaccctgttgaccttaatatccagcttcttgcaattctagaatatggagggaacgtgaaggagtatattaccaaactcacccgtgatggtgtgcagagtctttacgacgacttccttgaggttcttcgatcaaatagccccgtgctttgtcgagccctgcttcagaagctcaaaccctccggcgaggacggaactggcaaatcccgacgattagagcagtgggtttccagtgatgctgagtccattattcgtttctccgaggctggctttgctccgcgcgatttctttccccttcggatgaagatccgtaaattcttgacatggcttcttgagcgacatgtcgaagaactcaaaatccaggtccctctttcaacgtatgcttactgcattgcggacccatatggagttcttgggccggacgaagtccactttggcttctccaataactggcgggatccacagggccagtttgaagacaacctcctggatgggatagatgttctcgtcggccgacttccagcccatttgccgtctgatattcagcggcgtagagccgtgtgtaagactgagctacgtcattttaaagacgtgattgtctttcccactacaggggatttccctctagccggtatgctatccggaggagattacgatggtgatagaccgtggatctgctgggatcaaatgattgtagagagattccgtaattccccgatgcccgagcatgaatatactgcagagcattacgggctcacgaaacactccgtcccgatggcttcgctgaactcgacggaggactttttggaaagtacgttctctttcaacctcaacctttcaaacttaggtcaatgtactgtcgagcatgagaaactggcatacgatgagtcagtcgacttttcgggggcgaaagagctggcctgtctcttgggtcatcttgtcgatggccggaaaggtggagttcatctctcagagcaagcctggaaagaataccgcaagaccattagccctaaccaacgagcgcttcccgcgtatcggaacccagagcgcaagtccaaaccgtcgaacattgttgacttcctcaagttcaacgtcgcaaagtcggagctgcacagaattctctctggtctcaacgaggcgttccccgagaacgatatccaaaaccagctcgatgaggacctcgttcgtccgtggattgaagcagatgaagcatcgaagaccaagtctgagcacaatcaagaattaaaaaacgccctcgctgatgttcgaggggcgatcaacgaactataccagcagtggaaccaaggacactctgcttctactgacgaattctctcccatatcacgtcaagctgccgagaatgcgagtgcactccctcctcctaagacgggcagacatccgctcatccacacctggcaaaacagccccaatgagtggcgacggttggtagcttcatgtgcctaccgtcgatgcccaaactcccggtttatcttccacgcttttggcgagacattgtgcgagattaaggcatccgtctcgccatcccgccttgtcactaatgatgtgatcgcctgctaccgagtgaatcagaaaatggtggcacatatcacggccaatgcattgcctgggaatgacgccgatgatgtagatgagtatgaagacgaagatgccattgaagccatgctatccttttaaaggggtcattacgatgatggattggaggacaaactgtccatcgaataagatacgagtgacgccagcgaccctgtatttgatctgcccattttgattctgagcgatattttttcctgttactgttgaacatcgcatgagataccttgttgttttgcacgtgttggagtcgatatatagcgttgtcccccgtcagatgttgtcaagacttagaatactttgaacaaatcataccatcagacttttgcctaaagactccaaaacactatcaagtactccatagagaaagttcatcctagtctccaaatgtcaatggcccccacatcacatgccaagctcgatatgccgaaccaggcccaacaaatataagattgggcttataaatccattgaaagaaggatcatattggtgctgtgcccaataataaaacacccaaagcaggctcgtaagtacatctcgtaccggtaggccaaagatcaataaatttccttccatgtactccgtagacatgtgataggacggagcaaagtcttccgggacattgtccatctacattgtacattgtatgcgtacaacgtacggaggagagggaaaaaagaggtgaaaccgaagtggtgaaccgaacacgatgcataactagaatttcaacgtctagttcatggagggaaggtgtcagggatcaagagcaacccgagttgttctcgtattcggattgtcgagtagattctagcacatgtagggatacgagacatacattggcaatgataaaaatggaaacatataaaccttggaggggtttaggtgccttgtttcggggaccacggcgtcttctccgtaggacatttgtatttcttatcgtgtataataaatagtatgcgttgcgatgggtgtacatcgtacttcgtcggaatagaaatcctctattgaaacgccctacaggcaggtgcagagtgcgcccatcgtacgcagggcaaattgttgggcacttcagacttttcatatcgaatcaagtaaataattttcggtaagattgaagttccaagaggggcgaaaggaggcgagtgtgttggggcaaggaacacctggagatttggcatgtgatgaggaaaggtacatgggcggccataacggaatgtactgccgagcaggtaccgtgggaatgtgattacctcaccttcaatgttccttcctaattgggcctagtggacaagtgacgctttttcacgtgaaagacgatacgatgcgaaactccgacgtctttgaggttcattgcactctctctctatggacgatctgtgacccgccatggaacccccccaatccgctaggccaaaaccacctgcccgaaagaataacgccacagctctgacatcgtccaattcacacccctccgcgcatacaagtaacctcacttcatcacttacggctccaccctattataatggtcttccatctatgatggatatcgataacccagaagaccggtctcgtcgagctgccagtgtattatcgatggatgatctcgaggccgcgcaggcccttgaggggcttcgctccggtacgttggctctgatatccccgaaccggcccactaaaagtgtcgcaactgcggttttcactggattcggatggctgtgcaaccgacattcaactaatctcaacaatagattttggacaaacgcctggaacaacgcggcaatccctccccatcacttcaccggacccaccaccgccagagccactattgtctctgctgacttcctcccatccacttatctcctctgctatcaacggctcagtttctgcctacgccacgtcgaaatcatattcaccgcgattcaagtccggtgctgagttcatcgagcgcaacatcggatcacctgtcgcgaacaccgtcggtacggtaggccgcaaaactggtgtcgagagcggtctccgttgggcgttacagcgacgagattctacaggcgaaaattcacacactaaaaagcgacgaaagatggatgagggtgtgtcgccgagaacgatgaatgcggagaagggacacccaccgcgtacacggagctcgtccgatctctccatggccgagtcgctccccccgtacgacgaaatgaggtctcctcactacgaagagaaaccaagaagacgtactgaaccgacatggcaaagccgactagttatttcgacctctggactcggagtcgccatgagcgaggaatcgctacgtagtctgcaatattgtctgacttggcttcgatgggcaaatggccgactaggcaagtccattgtggcactacatggtgctgtcaacgagtgggaaaaccaaaaagcacgatcacagtcggatatcgaggcagggggcaatggccaagaaagtgcctcgttacttatccagcgcattcaggccgtcaaggccgatgtgttatctaccttgaaacaggtagtggatgtggtttccaagtatgcaggaggtgctctgccagagaatgcccgccatctagtgcgtcgacacctgacgtctctaccgcaccgcttccaggttgcatccacatcgcagccaccaccagactctccagccgcctcctctgatgccacaatcagtgcccatcgcatcctggtgctggcccaagagggtctagacatgatggcgcaagtcagcggcgtcgtcaatgacacattggtcagtgctgagcactggtgcgagcggcttggccggaaacgacccgagaacggagcttcatccatgacagagaagcagggcgagtctgcttccgacgctcagccgtatgacatggatgtcaaggagtctctgccagagaatgcgattcaggacgacgtcccgatgtctggaatggcaaaggtatgacgttgtccaagagcttcctctcgtctctttacatattcataatttctgtcacttcttgcctcttatctcggcggttctcttgtttctctcttatctggggtcttcttttcttttttttttttttcttctcatgattgatatcctttctgctatcttcattccatctggagtgataggaaaccccttggaaactttggtgtttgtttgtttaagcgtgcaatcattgtctatcctactattatagttatggatgttggttttcggtatagatatgcgcaagaggctgcgcgctcaggctgaatgaatgcaggctattcatcaatttacacttgagattttcaggagatcgtgtaagcgatctaaatcgccggggcctgctgaacacatgttttctggctaaatcggcccggacctgtcaacatactcaaagggccgtcaatcacatgggccgctatgtttgccttttcgttctagatcgatatcatttcaagcttatccacactgggctcttcgagcgggccaccccatcctatggcttcaagaccacaaataccctctgaggaaacaccaaaacacctgctaatagtcaggcaacgtttcactgttgacataaaatgtgtcataggtgctgctgaagccattgaactgggtagcagtggtacttgtatatgctggaactcagtcagttctgaaaatccagaccaatataatatggcaatactcacctcccatgtttttatatttgagccaatctccaaccttgacttcagaatcaagcgtcacctcgcgcacaacacaatcggtgctgtcacatgtcggtccccagatcgagtaccgatgggggatgcacaaagcatcccctgatttgggtttatgcaagaaccccctggctttcttactgaccaaataaggaaccatgatctctttctccataatcacattcatgaaatttccatatatgccatcattttgataaagcatgtctggaacaccagatcgagcagcactcccaagctgacggcgacgtgaaatcactcgacatacaagagtatacacactacgagcgaaaaaccgacctggctctgcgatcgttgtgataccagctggaaactccgaccgaattgcgtctcgaataataggcgccatagactcgaagcaatcgtcttgaaagccaccgccgatatcgagaattttggggtggaaacctagacgttccgcttgtgagaatgccagacgtgcatctttgatgcccttgcaaaatgacgctgggttgatagcacccgtccctaatagttcaggatggtcaatacatctgaccagctaagaagtccgaagtaccccggtgcttaccaacgtgaaagctcacaccaatcacattcaatccaagctcccaagctcttgaaaggagttcctcggtcgtatccaactgcgcaccaaacttttcgcccagacatatgaacgcaccctcgtcattcgcgtagatccgaagcaacagctgagcttccggcatgtgtgccttgatagtatccaattcgtcgatattgtcaaatgttgtccgcaagacaccaatatcgcgtgcgaaagctacggcggcgggtgctttgcagggattggcgaacagaatccgggctggatctacaccgaggctgagaactgcgcgcatctcttcaatggaggcgcagtcgaaccccgtccccagttctgcgaggactttgaggaaggttgggtcgcaattgcatttgaccgctgtgggaagatgttacttttctattccaaaaataggaacggactagaagaggggtgttgtaccgtaatacggtcggattccgggcatgttctgggtccaacgacgatgctgtcgaagtacctggcccaaatcggcgatgaagaatgattcgtcactgccaacgagagagcgtttgactatacgcgcaatgtgactctcaattgcgaggtcgactagctcgtctggtgggagatttcgatatccggttgcatgtataaccttgctagtgagcgcagtttcactaagagcagggagaagggccatgactgtggagaggagtcgatcgagaagaactggggaaaacggagagttctgtaactgaaacagcattacaagacatgtgtcggactaaaatacaaagtcctggagtatatgaatgttttcgagtgctgcactgcgctcttcggtgaacactgcgaatcaatcgtttagagaagctcggatgaagtgaaaggtgaagaaacgccgttaaaaggcaattttgcacgcaattgaaactctgcattacgttggatctcacgggaaggaataagcaataagtcgcacggataaaggccttgctttccagttaacctgtgagggaaccaattatatttcctgaagttgacgtcttgttttctatgtagggcttttcgtattctgggtgaagatcagcaactagtgctagatcgatcgagctgatcctgcacgattcaatgttggggatgaagtactccatatatcggacgtgatcagctcaatagcagctattatgtggattatggtggagacctacagggtcgagtgaaggcgtggagctgaatgcatgcacggagtagagtaacatcgccacacaagtacataaaggtcaaatctacactgaatatattggatagtgtgaccagaacgatggtaatagtatatttagaatacgaagctgaattgcgaaggtgactgatattccccgggaatgtggaatcgaactaatgtctgtgtctctgtggaatgaacagtatacttgatagcaacgcattcaatactttttatgtcatagaaactgttgagtttcgacatgcaggaaccactccatttccagatgtgatgcgtcgatctattggggagcagctgaaagccctagaaaaagaaatgcccagcattctttcagtcgaagatgagttattttcgagacctccaccccagattattccgctagggcctcgatcttggtgctttagctatgctcatcggctttctcgggctattatacggttacacatcggatgcaccaagcaacacatgtcgaacttgggaggcctcgagctctgggattgactcgtatatttgcttctttcaaaatgagatctacctagctatgacctctagggtgtcagctgtctatagatgggtgttccttataacatataatattgaaatccccgctggagcttcctcaagccccgaacactttggtttcacagactagttggagtcagaatgaccgggaaatggaatatccgcttcaaatatatcttccatatatgctgtgcgatgtctgagtaagactttgtccgttcccagacctaaaatgtgtatgcacgttgacaaagccttgaagaccaatcttatttttaaattcactagaaagccaacctccttcacaatgccacgtccttctactcattggtcctcacttcattacaggaacctgctgagtgacgcagtgaagcaccccaccagtaagggggatggcgttggcatacacctgccgaatcacccgctcagggagcaagcgctgaaacatttccagcgccttttgatccctttcttcgtcaccgaatctggggataatcaggcctccattaacaaaatagaaattcacataactcgccgctagttcgtcgtgatcggatttcaccaagcctcgtgggtccggctcttcaatggtgtggatctgcaagcgccgacccttagcgtctgtctcgcggtccagaatctctcggatctccgtagacagctcctgccacaggtcaatcgcaataggatgtggttttgagtaagcgatgacaccagggcgcacgaatcttgcctcagcatccatatgcacgtcggtaatgtcaacattgcgccgtcctgggaaccagatcaccttttcaatcccgagcagccgcctcaactccgtctcgatctcggccttggacatccccgggttgcgcacatcacatacaatgctactctccgtgataagcagcgttccttcgccgtcggtaacgagcccgccgccctcggcgcgaatcggagtctcgatctgcgtaacggggccgggcttgcgatcgtgctccattacccaccgcgcaaaattggtgttttcctgtagtgccttcttgtccatcacaggccatcgctgaccccagcagattccgtcgtcttcgggtttcttcccgccccattcattgaagcggaagttgattgcgaagcgtcgattcgggaatgcgcctatcttgtcgcgcacgtagactgggcctgtgtcgcggacccagcagtggttgattggacaggggatgatagatatttttgttgcgtctttcacgaaagtctggactagggactcggccaatgggatgtcttcgggcctcacgtatagccgaaccggttcgaagtcagtgatcgccgccgctagttgagctaattcattgcacatggcgtcaaactgatcggggggtagggaacatcgagatggtaatcccatgattgtcgcttcatgaggctccgactctgccgggaagatgtagctgctttgaactttgctctcattactgctgatgtgagagggttggaaccaggtacgtgtagtagtatagagattcgacagaaatttgcggaatcgctcgaatagcttcatgctgatggtcgctcgtgagttctcgcccttctcgtatcaagctggagtttctctccttcttaaagatgcaattcggttgccttcgtcctcattattctcgcacatcatctatttcgtgtaactatgagtgcctcatgttactcacagtttcgaagttgtgttcttggtgcggagtggtatttccattaaaatcaccgagagataacatgatttcggatatatagaaaggattcaggcggaagagatgttaagaggaatatatatagcgagggtttgtatgtcaatacgaaatacccaaacgaccgaatagctagacttcacgttcagtggtgcgagagagaaattataatctcatctcacttctcatggtctcaaaacaaatgcaataaaaagccacgtttgtgctactatatacagcatggtgcatgctactccgtcagcaggggttcacgttccatctcctcatcggcagactcagtccaggagacttcttccataggaccactgagccacaacataggcatagccgtaaccgcagaaagaactcccagtgcaagagtcataactttccaaccgtatcggaactccacgaatccacctaccataggtcctaatgccaaaccgccaaaatgtgccatattctctaagctaaaagcttgagccacggcacctctgcccccaaagacccccgggtctccagcttccatgtcatccaggacacgctgcatctccactatcaaggccggctcgcttaaattgatgcacattccaacaagacacagaatcacacaaagaagacctatgtgggatggtgagttttcctcaacgaaacgaagacagatcagactcggggctagaatggcaaagcttgcgaatgtgatcactctcgcaccaagacggtcagatagaaatcctagaaagtaggtcagatcatgcaacatagtatgataatatgaggtcagttaccaaaaaaaggttggaaaatagcggctgcggcacctggcaagaatataagcccagcgcctaaaacattccagttgaatgtgttctccacaaatattgggagtgtctatatagcagtgtcagtacattccaatataaaagactgaattccataccgcatcgaatgccgagaccacaagagcgccgactgtaactgcccagaggcaaacaagaacccggggctgcttcaaaatctttgccagcgcaaaactactcttagaaatttccgtgatcgtatccctagtgcgtatagtctcaaaagttccatatggcggctgctcggggatataaccattctcctgggttggccgctcgccatcagtgagacacagccaacgttgagcaatcctcttctcaacaacagcgagtctaagaaagaagtcaagagcaacgattccgaaagccataccaaaaacggcgtagaatcctccaagttcgtaaactagtccgcccagcagtggaccagacataaagcccagtgtcatggcggtgccaagatacccaatcatctgtccaagactcgctttatctactgcgtctgtcacaattgaaagaccagctaccgagaccatggccgttgctgcgccttgaagcaccctggcgatgatataccatgtcactgagtgcgaagctgtcaagattaccatagatgcgaacaacagcacgagtccggatagataggggccctggcgtgttccagagacgtcaagtatgtatccgaacatcggacagcaggtaaatgccgagacggcttcggcgatgaggaggacactgttccaatattctcctatcaaaagagaggctattagcaaatgattatctgtcctcgtaaatcttcgtactgtcttcgaatgctaccccagctcgtaaaactaatgcctgcggcatgacggggacaatctgtagcggtcaggtaaatatcaaaggtactagtcagagcatgtgtaccatagcgtagagaaagagatccttatgagtttgattagctgaagcttagtttgtctggacaggggatcggggaggataccgtgaacattgacagagaaatcgtcgtcactataaaggattgcgatgaccttagcggcagcagccacggtcgctggtcgcgaagcttcaaaaatggcttcgaccaagtcatgattagtgacctagttcaaacactgtgcgaatggtatgaggatatgagttgaataggtgggcttgttcttctttaatgttctctttctgtatgcagtctagaacttaatctgcattagcgaccgcaattgggtaaagattctcgttgatgtgttcaattgtactccgcagctgcatttacaatctgtttttgcgctagacactgcaagggagatgctcagatcactgctgatctctggggcactgtggcttagatgtgtgaatgacgttgctgcatcacatacaacatataaatttgacagttataatgaatatagatgcctattatcaatctcaaatccaacattttagagggaaactgccggaaccctaggtcggacaggtgtcttcataatatatttctggccacaaaccaactctgtgaaacgcaatgacatatctcgagaggatttgagcaatgcggtttttattattgcgtagtcgagctagtctttgcgcgctgtgctgaagtaacttgcaatcagtagcctgtatatccaaggccgtgaacttgggctgtccaccatttttagccatggtaaatattgcagtttccctcaacaaatcccacttatacgacatagcaggctctttttcttcctctcttagctcttctgcaccatctatcaagttcctggctgtttcgttacattgcttcttagggactgcgcggtaaaacatgaactgaatgtagatgaactgagttactccatgattccatcggcctagccaatctgtcacgatgaagcgcatatctccgtgataaatggagcgcaagaataggagcctcgacgttatttcccgatcctactttgtaggttacggagtaggtctgtttacatcagtttgaaaagacgttggcttcttccaacataccttgagcggttactaactatcaggagattggcactcgttgggtccatgattaactgaagaaagtataaatttaagcgaatagaattctctaaatgtagcgaactggcgggagactgcgtacgccgtcatcttcgtttgacttccccccccccccccccccccccccccccccaaaccttacccgcccgcannnnnnnnnnnnnnnnnnnnnnnnnnnnnnnnnnnnnnnnnnnnnnnnnnnnnnnnnnnnnnnnnnnnnnnnnnnnnnnnnnnnnnnnnnnnnnnnnnnnnnnnnnnnnnnnnnnnngtttccccccccccccccttcacgtagttacaaacgaagtcattgcgagatacgttgaatggtggggctagttattactatattgcattaatgccttatgactcttgtacgtagagtttatttatgcttacaggtgtaagcatgtgttcattctccacacccacagttttaaaatagtacgcggaacaagatagagccgtcagtgctgcgtatacagtataggtggggcctggaaattttatagatggtagttggaacatgctaatgcagcccaatatcgcttagtaggtcatcgttttgttactctagaagtcgatttaagatgagaagaaggtcaatgatgtatgtattaggtgagatattagaacttctctgtgaagcatcacaacagaaacgatctcaaacaaacgaactaacaagtatggaaacaaagtataccacatagctcctgtaacttttccatcgtgcaaatctgactgactccaaagcgaggcgcttagagaatggagccaagggcaacacaaggaagaccggcaccgacaaggtcgttgctggcagtggagggtgagttggcgcagcaggcaatgttctgcttgcactgctggttgaggagatcctggacaccgacaccaatgaggacagggactggagcgggttagtgagggagttgacaaatgtatagaatagtaaatcttaccctggaggtcgagcttggagcactggtcgaagacaccaaggccggaagcaccagagccggaaccgatgaggttggagagggtgccggcgaggatgccagagttgatgtcggtggtgtcaccggcgtaagtggccttgttgcagcaagagagctgagcctggtcaccacacttggactgggcctgctggacagtcaggctgtcgggaacggggaagcgaggagcgccaccgttctggtgctggagaccattgttcatgttctcagcgggcatggcagcggagaagccagcgagggcgaggacaacggcggagagagtgaactgcatcttgaaggtagaggattgaaagattaaaatcttaaagatataaaaaggttttaggaggtttggaagatagaaggttgagagaggtagagaagtagagagctgatggataaaaaaaatttggtacgacctggtgctcgccttttatcttccgttcacagtgcttgggcacgaggtgatctcccagtattcatggtgagggccaaatacaaccctcccatttttgcggatggaatgcagaacgcaagggtttagtcccgggcctgccccgatgatctccacctcctagcaatatcattggctcatcctcgattcccggaatttaacaatcaatgagatgctcccccttggcccctggagatgcatgggtcctgcattccgccctgtcagtggtatctgtcaaggttaccttacgccctgattcagttctaggatgtccaatcctggcttacatattttgtaaccctgcgagcctcacatgaacccctaatcaaacgagagcgagcatacacgtacattaaattagagatccggattcagagtccttctagaagtgatcaaggcgtggacaacccctaccgatgaattccctacagttccaaaagctgcccatgcgcaagtatttgaccatttattgtctttatcgctgattaacataccttggaggcgttcgggggcgttcgggggcgtcctggtggcagaaattgtccgatatggtgcatcttatttccattccaggcatgattatggcagcgtgtctttgcggcactttctaccttgttgtatctttgcaatcatgcgtaaatcacagtagagaccccgttcaattgccgtcccttacccatacttggatccaccgtctacctatctctcagtcccagggaattcgagatcgtcggacccgtgtcgatcatggttacttcggattttctaccctgctcccaggcatagcgtgtgatgttacgatgggcaaccgctgatctacactctcccttgtcgatgcaaaatcaaagcatcacgggaaattacaatgtatggaattgcaatgtatgggccttcagcatgttctctccatcaggcttggtctagatcgaacgttttcgggtctgatgattacaggctataggatgccaggtgatcctaatcaaattgtatttgattgaagaatgaattgtatactctaatagggttagcagtagagagtagctcgaactgtaccttgtcacctcgtccaagaagttgtgtctggtgtctatctacgatgtgtgtagattgtatgagaatgtttgaatgtttgaatgtttgaatgtttgagggtaccaccataaagaagcagactcgtagactcattaaggaaacgagtgaaatgattccggttcttatatgttgtagtgtgctataatgtcgatataaatatatatctccaacgaatgtcgaaaccagagatattatcccgcccagatttaactctttaaataccacatgctaaaccatcgatcaaaatgcattgcttagttctactcatatctttttaattagatcattgacgattgagccttaatgcttcaatggagaagcagttcatccgcatcgggaggttgttcatccgccactaaaccactttcggcttaacgtacgccaccggtctacctgtattccgtactttaacctcactttgctactatgtatgttgagtcggaggcggataaatatcaaagggtcaatatgagtccgtcgagaggacattatataccgatcgctagtataaggatgcttgaatcattagggttctatcatcaacattgcaatccatttcgagctctgcaatacaagcaaatcccaagctccaacccactctaaaattcacaatctgaatcccaaaacctacaaaccatcaaatcctagaaatgacagccattgcctttttcggagcaaccggtggctgcaccaacgcatgcctgacctacacccttctcaacggttacaacgccagagcgctagtccgcacgccctcgaaactcacgacactgctcctctcacagcctgacataacacaagatattctctctcgccagctggagatcatcgaaggcgacgcaacggacgtagaaagcatcaagaaaaccctcatcacaaactccaacgcacccaatggcgcatgtactctcgtaacaagcgtgatctccggcctgggcggcgcaccgacaatttccttcaccaaagaaacaaaatgcgcaaagactcagatccgtactcctgctctgccacacattaagctctcgaacccgcacatcacagaacagtcgacgcgcgcgctgctgacggcgctggcgcagattgcttctgagcgttttgcctcgctcggggcgtatcgtgccgttgcaccgcgggtcactgtgatctccaccacagggagttcaggtagtaataccgatgtgccgttctggtttagacctatgtactctgtgctcttgccgattccgcatgcggataagctgcagatggagaacttgcttgatgaggaggttggactgggctgtgccggggtgcttgctgctggagttgttgttgtgaggcccagtcttttaacgggggatcatcgggttcctactgttcgtgaggggaaggggggtgaaggggtggggctggaaaaagtgagggttgggacggagagggcccctgctattgggtatacgatttcacggggtttggttggggagtggatttttgaggagattgttaggggtggtggagggaaatgggttggggagaaggtcactatcactacttgagcttttcgccttctcttggtttcgtgagattcacatatttttcgttgtttgagaagatagctacgttgagtgcatacctggaagtgccacaaatttttgcatcaagtactcaaaagatcagctgtattcaaagatcaacgttatatacccaaaatcacaagtcactgcattgtatcggctaaaagcaaaacgcccccgtaggccagaaaacaaaatcacagaaagcaaatatcatccctacgggagacaatgaaactccgtataaaaccaacgataaaaaaaaagcatcattaacatctgatgatctgtacaggtggggcaaaccttcctaatgcccatttcatgacgttcgtgagagagaacatagaacttgctgtgatcaggtgcccccatgcggcgctgagcggtcgatatgagcactagagcggccaatctgagcactggaacggccaatctgcgcaccgggccgctcgatttgggtactggtccgctcaatctgaagactgcggcgttcctccttgatcctcttcttttccatcttcctcatggcttcttcggtcagctgttggcggaacagccgttcgacaacatccttctttcgggtgcgccggtcaccgatcatgatcatcacaccacctgagatgttacaagtgatggagaagcaaaggataaccgttgttagagcgaatgggcgcctatgagggtcctccatactccaggtacaggcaccaagagccatttggagtatagagtgacagtcgaggatgacgacaatagcgatgagtaagcgtagagggaaggcgtggtgggtcatagtttcgtgcggcttatagaaagtatgcgactttgcgaacttattctggtgatgcatcaatcgtaactgttgatgagcactgagaacagaaaattcatgttcctcttccttgactgcttcaccaaattcaaggtcggcgtcggtctccggcttcgacggaagatcgttcttatccttgaggcttggaagggcccgcttctgacgaagtttccacgacttgagtgtgtaatgggcaatgaaactcatgtgatatgtatccacggcgcggaaaggagccagtccgtcacccatgatggcgaacagggcaactaaaatgttatcgatgatattgacaacataactttgtctggcaccgagattgatccaacctgaagtgaccgtcagcatagtagatagaaagtattaggtcagaatatctcaccaatcaagaaaagaacccaggccagaccgaacagagtgatcaaagttgcgtagagagtcacaagaaagccgagggctaggcgacattagtattaagcaagaaagtcttggcgatgaacttctctcacgcttctttatgtattgcctaaatcctttcatggcccgtttgaacttggaccgccgagagtgaagcatgtgtcgaacatgatcatttagttcagcataatcttctctgctccatccttcaacctgccctcctggaagaacggcatacttgggaccaggcaacaccgaggacatgctcgtgaaatggacttgttctaaattcggccgctccttaagcttgtcatcggacagttcattatcgtccgttgcagttcccggttcatcatctgaagaagaatattgtggccgtgtaatcgtatatgtgggcatgcggttgacgaaactacccagattcggcacgaagagagagttttggacattggtgagagtggaaagcgcggaaacctcgggatctaggttcggacaagttagaaatatggttcttggattacacttgatatcaatgcttaccgatcacgtccagcacatcgaccacgtgagatccatactcatcctggcgttgctcctcctgttgcgtgctcagagttggtgcagtccctgtcactgtagctgcacggttccgactaaagcgattcatcgcagcttgactacttcgtctaagccggcccggtcgcactggggcgggagggacctcgccttgctccaggtcaggttggtcacagtcggaccgagcccgtccaggcaatattgccgctggagaagggggtgccggactttggtgtgaggcttcctcggtcagaggcaacatccgcataggggtcgccactcgagagaggccatcgggaggggggaatggccattgtcctggatttggctccgagttactgcgtcgtcggtttgccagccatgattcgtcctcttcattggggggaggggacgggatgggcctcggttcaaaggacgatggtggtcgactccctgattgagacgccggttgattggcgttgtcgagtgaagcgagagatgggaagcgagacaagcgaatactcggtcgtcgcattcgtgagtcgccccgagagcgtaacgagccaaggcccggcctgacggggccagactctgtgggttgccctgtgggttggatctcctgaggatttccattagaggtcctggggtcctcgaccgggtcgataggatccatcttgctgcaacaagattcaggaggttggggacaagatcatacaataaaagtagcccccgagaccaaaagaaaaaatgagataaccaaggatctgagactcccgagtccctcgttagtccccggacgttctggatcttcggggcggttcacgtcccaggctgactcagctcttcccgaatcttgtttttttctttctttccagtgacgagccagtggagttcacaagttcaatatcacgctaaattgacgatctttctttttccgttctggagatcttctttcaaggtcgaaggtcagatatcaattgcgtaagtcctgaattggagccacctatgtaaatggactacggtgatgaagtttatgcctgatattcaaggtgtctagactcttcatgcggcgatggcgataaccggggacccggacgtcatcagaagagaaccatgtagatctatatcgtgcgttacgacatattgtacaactttgtatatgtttttgatggcaattaacagggttaaagttcataacaacttgttccgtaggattcattccatgaccattttagggttattcattatttaatggctgcaaagatggctagagagatgtacgcattaaataacgattttaaacgaccataacaatgagccctgctctatctttaaactatttctctctcaaggcacagtactaacagctttcgttgtctacggagacgtgcacggagtgaaacaagcatgcgataaactcaacggcttcaattttcagaacaaatacttggtcagtacggtacgtgcatatggatcaaatgagtatcggtaattatttgaagatgaccaactttggatgttatatatcatcgtgacactggtggttaccgctacattgtagaagaaaagggcccgtgccattctaaaatatacatcctattccttagtgccaaactcaagatgcataccgaggcatagtttacatgcgatcaaaccagaccgaagttgttcatgaggaatgaccttgagttggccaatgtttctaaaactcgggtagatgaggaattaaccgacagagataggcccaagggctagattgtgtttctagatcggagctggcttgagcagagataattacttgtgagacgactatgatattgtgtaagatcaccgtgtcacccgtgtagcctgccctaatacttgtatccatgaccgaataattctggttgcatatcaaagtaaacaattgtatatccatgtcggccatcttctacaatctataatgtaagatgaacccgagccaagccgtggagaacatgaagtggagataaatgttggaagatcttgaattatttataggacctgtcacatctgcatatcatctagattctgcacatgtgcataacgtgcagagccgaaggatgagatgaataaaatggactaatcgagtggaataatatagaaaggacgaaagccaagagccgattatgattggcgggaaaccctagaaagtccccagaatgacatcaggtcagctgttctgagtcaggctttcaggtaaggcggggctggtgtttagggcctaaaggcgggacctcaggagattctggggctcagcgcctaacaataggggctggttggggggaaataggggtatcgtagggcagggggctaggggggtacctacgtgaacagccccccccagtcatcgaggcaagtacctcgattgcacctgtcgttgtcatttcgagctctcactgggctagtgccacaccgcctctcctttcccatttccatctccttctcccatcctcctctttcctctcttcaagatccagttcatccaaacttcaatcccatcttctcttttcaattggtatctagggcacgaagctaccctgctccttccccccgctccacctcccgtcaagtctctttcagctttaggcaaataaacaacccgactcttttcatcctttaatatctcaaccttcaagatgtctgaagtcgatacacttgctgactccgtggctgcgaccactctgaccgataagcccgaaatcaacggtgctaccccttccactcaggcagctgatgccgcggctgccagtgcagatgagggtcgtcgtctttatatcgggaatctcgcatacgcgacaaccgaggacgagcttaaggagttcttcaagacctacactatgtgagtacttcccaaattagtgttttcgtccgaacaatcaatcccacccggagcaaacattcaatcacgtggcaccatcatttatgggaccatttctaactcctttcgtcttaaagtgagaccacctcgatcccggtgaacccccgcaccaaccgtcccgttggctatgcatttgtggatatcgccaccgcccttgaagctgctgctgctatcgaggccctttctggcaaggagattcttcagcgcaaggtgtccgtgcagcttgcccgcaagcccgacatcgccgagcccaaggaaggtgctgccagtggtggtgagggtgccgaggctcgcaagcgtgctgctggtcgcggccgtgcccgtggccgtgcccgcggtcgtggtggccgtaccggccgtagccgtgctgtatgtgccaaatatctttccttgcttgaatctacgcatatcgacactttgaaatggatgctgacactcccgaaggcccaggaaggccaggaagccaccgaggcccctgccagcgagactcctcttgctgacaccaccaacgataaggatactgcctccaaggctggtgacgcccccgctccaccccccnnnnnnnnnnnnnnnnnnnnnnnnnnnnnnnnnnnnnnnnnnnnnnnnnnnnnnnnnnnnnnnnnnnnnnnnnnnnnnnnnnnnnnnnnnnnnnnnnnnnnnnnnnnnnnnnnnnnnnnnnnnnnnnnnnnnnnnnnnnnnnnnnnnnnnnnnnnnnnnnnnnnnnnnnnnnnnnnnnnnnnnnnnnnnnnnnnnnnnnnnnnnnnnngcggccggcggtcctcccgaggatggcattccttctaagactaaggtcatggttgccaacctgccgtacgacttgaccgaggacaaggtgggttatatctattcctttcgtctgatctccgtctggggttacattgactgacatccttttctccatttagctcaaggagatcttcgccgcctacgagcccgtctctgccaaggtcgccctgcgtcctatcccccgtttcatgatcaagaagttgcaggctcgcaacgagcgccgcaagactcgtggcttcggtttcgtcaaccttgcctccgaggagctccaggccaaggccgtcagcgagatgaacggcaaggacattgatggtcgtgtcatcgccgtgaaggtcgccatcgacagcccgggtaaggaagatgatgatattaacgctgtggctgagactgaggagactgctgctcctgcttctgatgctgcctctgctcctgctgctgctgctgctcctgctcctgctgctgatgctgatgcagctggtgcggctgatgctcccgctcctgctgctgccaaggagaacactgctccttccgtcaccactgaggcttaagtgccgcataaattgtactcgactgaacgaggtacttgttaattggctttaaggttgagaaacagaaggggactcaacggaggatcgtatcgatatgaccatagtgctctgcaaaccacagatcattgtgaatatcttagctactcaacgattgcgggagaaatggggagaaccctggtggggttggattcatgactttatcggacaacatggatcagccgaccatgcgagggagccatcttagctgatgtgctcttcgtccttaacgactttcttttttttttttcttcgccttctgtattgtacctttagcacacatttactaaatgatgacgatctccacctggcgtattcgatttaagagtaattcctgtacacctatactatagacatgcggtctacggagtatacaagtggttgtgcccgatttggagatgacgcgaagtccgatccttgccgatcagaggcaaaacatagaatttgtattctttcaattctttccagttgattttcattctctcgagccagttccattagctttgtgtcttcagtgtctttcagtctccgcacaactccatcgaaacgagaaaaaggggtaaattattcaacatcggtgccgcctcggtcaaccctacaacatcctagcgcacaccattatttagattgcgtccctcaacgtctcaccgtcggcattgtatattcacccactatgtcgcgcatgtgggaagtcgacccggaaacgaggacaaaggtgtgccaggtcaattccacaacgcgccatggtcactgacacaaccatgtgccacagctcctccaaatctccaagacgaacggaaatgacaagtgctgcgattgcggtgccccatcgcctcaatgggtattctttatcccttcctcttgcctattgccctgatattgtcttcgagaagctttatcatccccaacaacccatacacacctcacaaaccacacaccctgctaactctttgcttgtcattggcacatcaactaggcctccccgaagttcggaacattcatctgccttaactgcgccggcacacatcgcgggctaggcgtacacatctcatttgtccgttcgatcacaatggacgccttcaaacactccgagatccaacgcatggagctaggaggcaacgagccctggaagtccttctacgatgaacacccagtcaccgtctccgaaggccgcacattcgaagactccacgattaaggaacgatacgatagcgacgagggcgaggaatggaaggagcgcttatcgtgcaaagccgacggccgcgagtacgtccagggccaggagaagaagaataatgccccctcgcgctcgaacacaacttcgaaattgaccggcacgactgtcgctggtgccggtgctgtcgctggcggccgggctggatcgcctgcggcctcatccatccgctccggtgacagcttgcggggtgtgccaggcaagaaggagcagaacgaggcttactttgcgaagctggggaatgaaaatgctactcgcgtcgatagtctgccgccctcgcagggtgggaagtttactggtttcgggggtggtatgcctgcgcccgccgcgagtgatcggcgcacctcgccctttggcggatttggaggttggggtgttgggggtggaggtggaggtggaggtggtcagccgttcgaagatcttcaaaaagacccgttgggcacgatcactaaaggacttggatggttcacgtctacggttggcaagagcgcaaaacaggttaatgatgcttatctacagcccacggctaaacaggtgtgttgcacgacctcgcttgagagcagttataggtgtctatagcttcttccgatgcaattactgacatgaattacccagctggccgaatccgagttcgcggcccaggcccgcctccatgctgcaacactcggccagggcctgcagacaggcgtccgcggcgctgccgaccagttcaataagtttgtcgaaggagaggatggacgcggtgacggacgccggaatcgcgtggagcctgagcgccgagacttctgggacgacttcgcctcaatgggcgaccaagagacacctagccatcgccgtagcgcatcacaacggtctcaacggtctcagcggtccgacgttgttggtaccgctgccatgcgcaagagccccactgcctcctcgttgggtcactctacgcctggtttgtctggtgaagccggagagggtaagaatactacggcttcggcgacgggtaaaggaaaggatgaatgggatgacaactggtagcatataagcgctctattttactgttctctgtttgtttgtgggccgttgttatggtgccatgactttatgtctctatctgcactacacatatatcttggtagaatctccctctttcgcaaagggaagatcagatgcatagtccataatacttcatattagcttgacatggtgtcaatcggggaggtgtgagaaaaagggtggcagaaagtagaataatattggtacagtgatgagatactatgagattgtgataatatacaagaaagtttctactgaatcagcctctcagttccgcaagcacggccttctgtctctgaccagacatcttctcaaaccggtcaacactcatgacaaaagtaccgcggccagcagtcaagctccgcaaatgcttgagatacccaaccatctccttgagcggcacctttgcgacaattgtgcgcgggcgagtcgcagcagcagggatctccacgccaatagaagccgtctcgaacggatcaggcggcgcgtaaacacggctgtggtcaatgggcggcaatgcctcttcttccagtgcagatgcagaagtcgcgtccgtgcctgatagcggtacctcctcgtcaagtgagatgatatgtccacctcgtgaggaggaaatgtcgtgcacgacggagccgagactcgcctcgtcaatgctgataatcacatccatcaccggctccatcattactgtccccgcgccgagctgtacatccttcaacgccgcagcggtggcttggcgtgcggcggatgagagggccgaggtggttgtttcgttgccgaagaggtcggcggccgggttgatagttagtgtgacgcgggtgttatgcattgggaaggtgaattgaggcccccgggcgagcgccgccacggctccgttttgcagcgctgtgcggaacgcgacgaggtccatgcctggtgggagcaatgggctagtttcttcttcgccacgcgatgactggtcaatttggagaccgggggcgcggatgatgatctggttgccgtcgtaggtttcggcgaggagcgtggcttggtctagctcttgggactcgaggtcttcgtccagtggctccacgactgctgtgcagcctgctttacccttccgtccggcgatctccttgtcgaagatcttggttattgggctggaggtaccaagtacggattcgcgatagccgatctcgatgcggcccattgtggccttggctttgagatcgttgattagccggtcacgggcaatttcgagatgcaactcccccatgccgcttagaagcgtctggcctgactcttcgtctatgttgacgtggagactggggtcttcacggaggaggagtgcgagcgattctttcatgcgcttctcctcgcttaggctgtgcggctcaacgctggtaaagaataccggtggtggaacagcaataggtcggagttggagactggtaagcggctccgggggagtagctttgttccctgcgtaggacacgagggtatcgcctgtccgggtgtgtttgagcccgactacgactccgatgtgtccggcagcgatcgagtccacttccacggcatcgttggcgtacatcttcagcagacgtggggcacgctcggagagctgcaggtttgtgttgaatagaaggctgttgcgatccaacgagccagaatatactcgtacgtagactagaactccgcgctttgcgtcgttgaccactttgaatgccagtgcacagctttgaagcttgctaatcgcatcttttgagctggtctgcaaggccaagttctttttcttcggttgtttccctttcggttgcgcggatgccttctcgctctgctccacaattaagtctccggacagcaggtcccgaagacctcccttgacaccgccaatactcacttctgggtcgggagcttcgggcggacttgggagaagattcacgatggaatctagtaatggctgaactcccatgttccggaaactggcacctgcgaatagagggacaatttgactccgctggtccaacacgcaccggcgcaagctctcaatgatatcagctggcgagacggcgagatgatcttcttcacactcaaagaatttctcaacaatgtcttcatcatgctcactgagcagctcgaccaatgcaattcgtgcgcgccgcagctctgcggccagagccggctcttctgcctctaattgctgaaggtcggccacttttacattgcggccatcctcgccttccttccatcgtagtccttggagatggattgcatctgctacccctataaaggggccattgcctccttggaaccacggtatctggcagaccgctggatagacacccaagcgagtgctgacttctcgcaccgtcctaccaaatgcggccccgtcgcgatctagcttattcacaaaaatgagtcgaggaatgcgataggtgcttgcctgattccagaccttctccgtctgcgcttcgacaccggcaacaccatccaatatgcagacggcgccgtcgaggatgcgcagagatcgcatgacttcaaatgtaaagtctgcgtggccaggggtatcaatcaaattgatagtatgcgggtaagtagaccgcggggtttgctcattctgcgccccagcttgggggcctgacgctccatttacctctccgggaggccaatggaaggtaatagcggccgactggatagtgataccgcgtgcacgctcggcgggaaggaaatcagtcactgttgagccttcatccacatcgccaatgcgccgtgtaaagccactgtagaataacatgcgttcggtagtggtagtcttgcctgcatcgatatgggcgataatgccgatgttccgggtccggtccagagtctcatcctggcatgcagatgtcgtggaaaagcgttgaagctgtgtgtaatttgaccgaagacccttgagggaggaatatgcatttttccacgtcccattgctcggtgtcttatatagattggagctcatacagcgcaccccggagggaaagcgcaacaacggagcgacgaccattccaaggggaaacgctcatgtaataagggacagaagatgaaaaattaggttggaattggcattgggctgtatgatattgttattgatacaatagaagatcaagctctagagcgaagaaatcggaccacaaagcggactggggatcgccaggcttggcgcacgcattcctcaatgcgtgacttgactccgacactacctacctctcctcaactactcagatccttttgctcatacccttgctgtttatttgctgtctttgttatgccaattcaacgggtctcatctattctctccgtttgaagctgcacgaggtaggtctttgagtgcctggaagctgaccattactgtgggggtccgatcttcagccgtttaatactgacgcctgccatgaccagccactcccccttgtcagcgattatactccttacgccgaccttcaactaagatggactactctaccatctctaccgacccggatcatcctgtcggtacctcgccctggggatcaccgcatgttgagcgaggcgccttccccacttccagcaatgacatcccgtcgtcccctttacccggccaggagcaatcggcggacgttggtagtagtcacaatggagaaccccaatctccagacctctctgcgcagctgcagagcgcgcaattaggagacccggactatcccgaggagccattcagcgcgcaccagccttcaaacagccagcaacaactatctcctactctcgcacaatttcagaccggagcacgagacacacggccccccgctcccgcctatagaatccaaggaaaggtcactggtctggagaggacggggaagaaagacccaatcctgcgtttcgacatccacgtaggtctgcccctgggagtatttgcgcctgtgccatggctaattcccgatttttctttgagatcagaccaatattcccaaattccgcacgacccagtaccgtgatgtgcgtcggacccattccgaatttgtcaagctcgcagaccatctaatttccgccaacccggaagctctggtccctgctgtgccatcgccagtgacgccggccggcgccggcaccgaggaggatgagattcgcatcaaatcggcgatgcagagatggctcaatgttgtgctaagcaatgaaattctcattcaagacgacgaggttgtgcttttcgtggaaagcgacttcggctatagccccgtactgcggatgaagcagccggcaacgggcgtgcgacgaaagatgttgaagcagtttgcgccgcctccagatgacacacccgagttgcaagctgctcgcccaattgcgaagatgttttacttggcatcaatggatacgagccacaaggtcgaccgagttgtcaaggcccgtcgtggtacgttatcggagttttaaactgttttggtcgcatattttgttccgattaaaactgacaattttttagggcttggattggctgaagccgatttcggcgtgaagctcggtcagatgagcgtacaggagactcatcccggcttgggcgccgcttaccgtaaacttggcaagattgttcagacagttggcgactaccacgctgttcaggccaccgcggaggctaccactctcggcgaaccgttgagttaccactcttcagacgcctttattgtgaaggaaaccctcaccaaccgccatattcttctgcgtgatctactccaggcccaacaaagtgcacggagcaaacgtgccgcagcagaccgcttgaaggttagctcatcggtgcgtccggacaaggtagatgaagcgatcaacgctcttgaggaggcccaaaaccatgaagattacttgaccaagcggacccagcgtgtcacgtcaaaccttctccaggagaagcgccgctggtttgaccgcaccacccaggatcttttatccagcctacgtgagtacactctccgccagatcgaagctgagcgccgtactctggccactttggagagtgtccgacccgacattcgtgccattgacgcttccggtggtcttagccggctgggtcgcgaatcccacccagcgatgcgccggccaaacatggcttcgagccagggccctaagggtgattcgtggagcggtgttcctcgccgcaatgacaacattggacgcagcatgagtggcagctttactgccccctcgctccctgacgatgatgatgaggagagctctaataaaggacgcaaccgagcttccagtcaggttgggtcgattgcggaggaagacgatgaccgtcttgatgcgcgaaatgcagccagcagattggccaccagcacgttctgatcgtattttgggacgcaacgagtctgtacatgtagccccggcacgaactagtgattcccctttgttcctcttataacttttcgtgtcctcctgttatgttatctcctatgcacaatcagtatccttttcaaaattgattatagttgcaattgttctatatgactttctaaatgcatggtgattaggttccctgcaccaacatgaggcctctcgaatgatatcaagtcatcaatactacaacttctcatattccccccacttatcccacttcttcgtcccatccccctcaggtaattcaaaccaagacgccttctcactaagaaagatatgatggcttggcagcgggatctttgtcttctcctcgtcgagggtccccgcagcgattccgatactcttcggatcacgatgcaggagcatactgagagtcgaaccgcatttgggacagaaggtacgcgtagcggcctgggttgcctgtcgctctgtgggactgacatgccatcggatatcgtcagtcgcaaagaatgcccaggtttgatagggtgcgccggcttgtttgcggcaggttgtgcagtggcagtttaccaggcaggttgggggagtggaggccgtgtagccgatgtaattacaagcgcagctgccggaagccattctcggtacttggatgttggaaattgcaggattgcgaaggtaatcgcgattctgacatcatgtggggtatcgaagctctacatataccaaatgggcatggacgtgtccctctataattagccactttgtacgaattacagagttgatttccaatctgtacaacatcccctcatcgtcccccacttggtgctcgggccatatttgatttccaagcgtctcaacttccgatcatacttgcttcacttatttctatctgcgaaatctttttcttcttcattttccaattccaccatgtctcccaaggttttcgtgtaagtcattccggtgtaaaccgagcactcaatctaacgagtcctcacaggactggcgcaactggctacatcggcggcgacggtctgtttgttattgctaacgcccatcctgattggcaattctcagccctagtccgtagcgaggaaaagtccaaacaggtcaccagccaacacccgcagattcggactgtgatcggtgatctagactcgtccgagctgatcgaagaggaagtcaagaacgcagacattgtcttccgtacgtttattcaaacttatatatcaggatatcatgtcactaataacatatacacagacttcgctaattgcgatcatgttgccgcagctaaggccattgccaagggcgctcagcaccataccgccgagcgtccattgtggctgattcacacctctggcactggtatattgacaatcgaggaccagcgcgctggcacatacggcattgagcggcctaagcagtacaacgactgggagggcgtcagtgagctagtcaacctcccatcagacgccttccaccgtaacgtggatgagatcatcctcggggttggtgagcagaccccggccagtgtgaaggtcgcagtcgtatgcccacctaccatctacggtcttggccgtggccctggtaacacgaagagtatccaagcctatctgctcggcgctgcggtgctgaagcgcaagcggggcttcctggttggaaaaggcgagaacgtctggcaccaggtccatgtccatgatctgagcaatgtctacctggctctgggcgaggcagcctcggtgggaggtggcaaggctacctggaataacgagggctactacctcgctgagaatggatcctttgtatggggtgatatcgagcgtgcagttgcacaggctgcttttgataagaagcttattccttctcctgatgttgagtctctcgatggcgctcagacgactgaggtactttctgttggtacctatgcctggggctctaactcccgtggcaactcaatccgtgcacacaagctctttggctggacacctcagaagcctaagctgattgatctcgttcctgagattgttgaggtagaggctaaggctcttggcttgctgtgaactcggtcttatgttaattcgtgaaaacactatgaaattgacgtattaaagagcacaatgtttgagacctttgaattaggatatgcaaattgcaatgtagtccagtgttgttttgatgtgttattcctttcttcgatgtttttgaaaggtgtggggaacattttaacactaggccacaacaaaaacctcgcttcctgtttaggccatattcgcagttcgacaaaaagaagaaaaagaggcaaaatagaatcgtcagcactaggactcgaacctaggttcacgaatgaactacttgacggaaggatcataaaagaagccgttcgaaagtagcgccttaaccactcggccatactgacttgataagaaaattggcaatcttgtgcctactagcggctgcacttgacctcttagtagggttagacgcctaagacctcctgccaagaattcaggtgtttaatgtcagtaacatctgctggtgaagtatccgctagacttaagagaaacccgacatagttatgcagaccacgtgcgggccttattcaatataaacaatgttacaatatttacccatatggcaatatgaacaatgacctattcacctgttcagctaattattcactctcatttaacggcttaatcaattgtagcttctattgttcctttaattgaagagctaggtcattattgaagagcttgaatggtaatcaataataaatcaataaggcacacatgaactcttggcgggggcctcaggcgtctagccctctggaggaagctttgaccatcagcatcttctgtcttcaccttacacgcctttggcttctgcgaccaccttgtactcaacggaatatctttgctggtacgcttgatatgcgcattatttcccttctttacttatcccccttcattcgccgcgggcgcttacattcattcttccgggctcctacagaaacgactgcatgagttgcaacctttcagcgtccagttccaccgtcgtaacccctcgtgtctaacacggctacctatcatggcgcctgggtacggacatggtggcaagcggaaacgcatcgatcgctcatggtccggcgagtcagggagcaatgacctgcgaccttcaccccatcgccctgggactctcaatatggcacatcaccctaccaatcctggacatcaatcccccactcctcgagagcagaatgacacacgcgacagatctcgtcgacaatcgcaccgcaaccgggctggttcccgccgcggatcccacgatggtcagaatttttcgaattcgcagcacagagaaccgaacgcgatgtctcctcccgcaataaatcagcccagggaacttgccgaccccgtgccgtataatggcgattcggccgcgtcaagacctaccccttctcccgcgccgaatactcctgctccgcagccgcaattcaacccgccgtctcgagctagctcagagactgtcaccccccacccctctctcccacccccgccttatgattacgaatatgtgaccgatagcgctgttgaggaatgggcatcagcgggcaaacaaaaggtagtcggagaagggactgcggctcgcctggaacaggatctggctcggcttgcatctgtctaccaggaacttattcactccgcgatctacggtcgactatcaccatcgcatgcgggaaatgctgtcaaaaatatcatcggtgaagaatctgtgtcccaggatgtggatatggatagtgggaagcctttgaccctaggaatcgatccgcgctccttgttcctcgatacgctttccatcgtgactgacgctgacccctcgaacgcggccctcaaaccacttgtatttgcgacaggtattgatccttctttaatgcgccttcagcttgaaactccgttgttgcagtccctagggctggttcgcgaaacctttgcgcgaatgggaattcgaaagcagaccaatctgctctaccgacagtccaactacaatcttcttcgggaagaatctgagggatactcgaaacttatcaccgagctattcaccacaagcaacaatgagccgccgtcgagtgaagtggtcatggatacatttgaaagagtcaaggctatgattggcgcatttgacatggatgtcggccgtgtgctagacgtcacgctggatgtgtttgctgcggttcttgtcaagcaataccgtttcttcgtgaagcttctgagggttagctcctggtggccgaaggaagaagccgtccacagactagagcaaggctatcgtcactccggtattccgaattgggcacttccagggtcaactggatggatcacaaccgacgaggaacgatccgctactatgcgcgcgaatgaggagcgtgacagccaattctgggatcgagtgagggaaatcggacttcaagccttcttcgagatcggccgcaaaccggtcccaggggtggaagtgcaacgcaatctttcggaaattaacggttcatcatttgaagaagatgccacacgatcatggctcgaagagactggcactatacccccgaagggcaaccgggttgcagcacagctgcttggtttcaaattgcgattctattcttcatccgctcgaaccaaagacgacgttcttcccgacaacctcatttaccttgccgccttgctcatcaaagttggctttatctctctgcgtgacctttatgctcacctctggcggtctgacgacaccatggagattctgaagaccgaaaaaatggcagaaaaagccgaaagagtgaaggctagccgaccaggtggcggaatcaacgctttgatgatggccggtgctttgtcggacgacacaatccctccttcccgcttgcgcgacgagccgcgagtggcgacccctagtaaagaccaagaatccgacaagggcaccgccaaaatggaaaacgagttgccagacccatcagaccagaaagtgctgctcctcaagagtctcctcgccattggcgccattcccgaatcccttttcatcatcagcaagttcccttggttgatggaggcttatcctgagctgcccgagttcatccaccgcatactccatcactctttgaagaaggtttacatccagttccgaccatcggtatctacaggtgactttcccggagctcaatacacggtgacttctgatcagaacaatgcgaagggccagatcggactcacgcccccaccttcgagacgagtactgcgatgggctcaactagataaagaagacaccaacgatggcaccgattaccgattctactgggatgattgggccgacaacatccccatttgtcaatctgtcgacgatgtttttgctctttgctcatctttcctcaacctttctggtcacaagattggacaagatgcgagccttctggcgaagcttgtacgcattggaaagggaagcttgatccaagacggatccgaagcgaacagaacacgttggcgcgatctttgcaagcgtctcctcctacccgctgtcagtcttacaaaagcaaatcctggtgtggtcaatgaagtttttgatctcatcagcttcttcccccgagatgtgcgatacaacatgtacgcagaatggtactcaggacagacgtcccggctgccagacatcaaggaggccttcgaccaggccagggcagagaccaaggacaccctcaagcgacttagcaagacaaatatccgacccatggcccgcgcattggccaagattgcttacgccaatcccggaattgtcattaatgtcgccatgagtcagattgagtcgtatgaaaatcttatcgaagttgtggttgaatgcgcacgctactttacttaccttggctatgacattctatcttggtccctcattaattcgcttggccagaaaggacgaagtcgggtccaggaaggtggactattgactagtcgatggttgaacgctctctccacattcgctggtcgaacttacaaacggtactcggtcatggaccctactccggtcctccagtatgtggtggagcaacttcggcacaacaactccaccgatctcattgtgctggagcaattgatcagctcaatggctggcatcatttcagacaacgacttcaatgatgctcaaattcaggccatggccggtggtgatgttctccaatcccagactatcttgcaactgctggataaacgtcatgagtcaaagaccacctccaaacggttgctcaagtcgttgacccacaccagaatcgccggtcaactgttggtcgccattgcccaagaacgactgacttgtgtgtacaatgaaacctcctcggagcttaaattgctcggcaatatctttgacgaaatccaccgaattctcactcaatacctcgacttacttcgcagcaatctctcggttgatgaatttgattcctttgttccggacttttcttctctcgtcacggagtttggaattcagcccgaaattgccttctggattcggcggcccagcatcgctcggaaaatcaacgacattgaagaatcaaaacaagagaaagaacgttcagtctctgtatcgaagtcgaacggcgaccacaagatggatactaccgaggacgaagaaaaacccacgaagtccgagactccggcagacagtgccatggatgtcgataaggacgaaactactccgaccgaaggacccgatgctatccttgcttccgcggtcaatgccgagccattggcagccaatcctgtcatgcaagatttgattgacgatgtcaagtctgctcttcctgctgagacatgggggaccatcggagcacacttctatgcaacattctggcagcttgccctctatgatgttcatattccgcagaaatcctacgaggatgaaattgacagactcaagcggcgagttgtctctatcaacagtgaccgatctgatcttagcgtggcgggcacggcacgaaaggagcacttgaagcgccagattactcagctacaggagcgtattctagatgagaataagaatcacctgaaggcgtatggacatacacgctctcggttgcagaaagagaaagacaagtggttcgccggcatgcgcctcaagcatgactctctcaatgttgccctgttggagcaatgcttcattcctaggcttctattgtcccctcttgatgcattcttctccttcaagatgttaaaattcctgcacagctctgggacccctaatttccggaccgttggtctccttgaccagcttttccgcgagcagagactcactgctctcattttcttgtgcacatccaaagaagcggacaatcttggtcgtttcttgaacgagatcttgcgtgatcttactagatggcatgccgataaggcagtttacgagaaagaggcattcggtgccaagagagaccttcctggcttcgcgaaaaacgtcgatcccgaaggtgttccagtgatgtttttggaattcgaagacttccggcgtctgttgtacaaatggcaccgcttgttctccaacgcgctgaagagctgtctcagcagtggtgaatacatgcatattcgaaatgccatcagtgtgctcaaggctgttgtgaagcatttccccgctgtaaactggattggtcggaacatcctgaactgtgtcgaccacctgagcaagaatgacgagcgagacgatgtgaagattcccgctgcttctctgatcggtgacctcaaccggcgcgagaagaagtggatgctgccacaggctttctattttgcggcagctcagcctggttctcagccacctggcgacgcatctggaacgcccgggactcctcaatctgctacaacagcgttgaacgcctcagccccagagttcaaccctactggatcctcaatgtaagtgacagccttgaccatttcgacatgctcacaatgactaatctttccatctttagctccgataatattgccaagcaggaacagtctggcaagactgaagtcgaggatggtgaaattgaggatgcgaaaatgaccgatgtcggtacaggcaagggcggcgaagccaggcggaccggaaccccctctcaggccggatctaccacgccgtccatgctcactggggaagaggctacatccggtgaacagccccctgtgcgatctcgaccaaattctcgtgccccgacttcatcccgtcagcctgatatccccaaaagacccgatattcgccaacaagttcatcctcccgttcgtcccccgccacgacacagcgatggaagactgcctccccgccccgagggattggatgaccgacgagagagacatcctgactttggaccccgcggtcgtcatggcccagatcataaccgctcctttgatggttctctaggcgatgtgcgaggacgtctcaatgagcatctcaatgaacgtgatcgtgaattccccatgagacctgcggctgatgatcttatgcggggaccacctcgtgattctcgttctactcgcgagaatggttggcctatggataggcctggtcgcatgcgtgggcccggacccaatgattcgttccatggacgtgatccctctgtgcgaggagagctgatgcctgaccacatggaccgcccagtcgatattcctcgacgtggagattcgtctagaccagagaaagacgatcgcaggccctatccgccacgccctctatcgccccctagacctgttgacctgccaaaccgccccgaccgattccccccacccgatgatcgcagacctgccgggtttaccccgtcctcccgtattgatgatctccccaggggccctcgcacggatcgacaacctgatccgagggacgctgcaccaggtcctgatatgactcatggtcggcttcggcagccggaacctccgtctgagattcctgccggcccccgaagacgcggtggacgcaatatgtctggacaggcacctccaatgctcagttcaagcaatgctaccttacctgctccggaacgccagacacctacgggccctgcccgacaaagtgggcgtggggcacccgagcaacccgctcctccaagccaaccagcgggctcaagcactgccccgggtattcacccagatcgccttagaaatcttgtcaatgaacctgcagcccccgctgctgctccatcgggtcctcgcggattaggcccacaacaaccacctcggggaccctctgctcagtctgggcagtctgggcagtccgggcagtctggaccgcctggaccgcctggacaaggcttcggtggggagcgtggccgtggtgataaacgtttcgcaggcctcaacaatgtgctccagcagtctggtggtggcagtggtgaccggggtgggaacactcctgttcgtggaagaggcgccaatcgcccaccaagcaccatggaggcaccatctcctcagcctgcgaaccgcccacccatgggtcctgcgggacctcaagaagatcaatcccgtaaccgatccaacggtggccgaggtggcgacctgcttgatgatgccgttcccgaggcgggtcgctctggatcaactggaaatcgcacccgtgaaacagagcctactcgcgagaaagaacccgagcgccgtgagggcagcagcaatggtcgcaatcgacgcgatggccgtcgaaatgaccgtgaacgcagccgtcgaagcgatgtaggaggtggcggaagccgcgacgacaagggcactggcgagccccgtgagactctgcgccgagtccagagctcacgcgaagagctgcgacgccgagaccgacgtgaccgcccagatggaccgccaggaataactggaccaacacctagcagtgagacccatgatgaaggccgtgtgcgacccacgtcctctatggaggcaccgccaccaccccctcctcctccacctccgcccatgccggaaggaaacgagcgtcgtttcaatactggcgaacggggtagccggtccgacaatcgggatcgtgagcgcgagcgccgtggcgaccgacgtgaccgggatcaccagcgtgagggtggtagctctgggggctctgggcaccgtaagcgtggtcgacagggccctgacgatggcactgacggtggacgcggcatgagaatgggaaatgataacaagcgtcctcgccgaggagcgtgatcctcaccatttaccatgataccccattgaaaggaatggaatttgcttttttttatgttcttttgctacaaacctcaagttcctctacactggactttctactgtttcctatcttgactttgcattttgcgtggtgtttggggaccaaccacttcacttcttcacatgtactttttcttcttcttctaaatgaacgtaactgaaatgcaatatccaaagatcttccatgattaataatttctttccatgtccgaggttctccgtactccgtctctcgtctctccaggctcagcggtccaatatccgacgtgccccgccctaccgtcagtcgggtaaacttcggttcgcaactacctccgtgcccctttgagagagttctcttgagagagcgagtggatgatcagccctaacatcttggaatatcatttgttcaagtcctggtatcatatatgtagccattgtcattggatacgattccacagcttccccgcctacacgggctggtttcacaatccgacgcttcatacattgaaggcctgaactctttagttttgcgtataaaagattgattctgttcttattcttcttttttctttttggacaacgagtgtatcacttctctgtcttcggagattaacaacctcgagcttattggacgcttcattctcccttgcagttgaacaagagcacaagcaattaatatacccccaaaagagaaaagagagctgctacatcatgcctcgaatcgacgttgagaaagccatcgaggagctcaccctcggcgagaaggtggccctcacagccggtaaacctgcttcctattgccaaagatccaattcaaactaacctcaccttaggccgtgacttctggcacacacatcctatcccacgcctaaacatcccctcgctacgcatgtccgacggaccaaatggcgtccgaggcacccgcttcttcaacggcatcccagccgcctgctttccgtgcgccaccgcgctcggcgcaacctgggataccgagctcctctcagaagtcggcgcactaatgggcgaagaagcgatcgcaaaaggcgcgcacatcgtgctaggcccgacgatcaacacccaccgctcgccgctgggtgggcgcggcttcgagtctttctcggaggatggtgtgctctccggcacgctcgctggccacttctgcaaggcgatgcaggagaagggtgttgcggctacgcttaagcactttgtctgcaatgaccaggagcatgagcgcatggctgttagcagtattgttactaaccgggcgctgcgggagatttatctcatgccgtttcagctggcgatgcgcatttgtcgcgcgcagtgtgttatgacgtcttataataaggttaatgggattcatgttagtgaggataaggctcttattgatgatatcttgcgcaaggagtgggggtgggagggtcttgttatgagtgactggtgagttacgatgggttcattctgttatttcggatgctcacgtttgatttttaattgtaggtttggtacatacagtacctcggatgctatcatcgccggtctggatatcgagatgcccggtaagacccgctggcgtggtgatgctcttgcgcacgccctctctgcaaacaaagtggcccaataccagctcgatgaacgagtgcgcaatatcctcaacctggtgaactgggttgaacccctgggaatccccgagggagcacctgagaaggctctcaaccggccacaagaccaggctctgttgcgccgcgctgctgccgagtctgtcgtgcttatgaagaatgagggtgatattcttccccttaagaaagatgggtctctgctggtcattggacccaacgctaaaattgctgcgtactgtggtggtggctcagcctctttggctccgtactacactgtcacgccgttcgctggcgtctctgccaagtccaagggagaggtcaagtacagccagggcgtgtactcccacaaggacctgccgcttctgggtccactgctgaagacggcagacggcaagcccggcttcacattcaaggtctacaatgaacaccccgactctggagaagaccgagaggccgtggacgagctgcatctactcgaatcctccggcttcctaatggactacgtcaaccctcggatcaagtcgatgacctactacgtcgacatggagggaacattcacgcccgaagagagcggagtctacgacttcggcgtgacagtcgtcggcaccggccaactcctcatcgacggcgaattagtcgtcgacaacaccaagaaccaaaagcaaggctccgccttcttcggcacagccacgatcgaagaaatcggcaccaaagagctcaaagccggccaaacatacaacatcctcttccaattcggcagcgcgccaacctccgacctagacacgcacggaatcgtcgccttcggcccaggcggcttccgcttcggcgccagccgccaagtaagccaagaagaactaatcgccaacgccgtcgagcaagccaaaaccgccgatgaagtcgtcatcttcgccggcctcacccaagaatgggagaccgaaggccacgaccgcgaacacatggacctacccccaggcagcgacgagctgatcagccgcgtgctagcggtgcacccggacaccgtcgtcgtgatccagtccggcacgccggtcaccatgccctgggaacacaataccaaagccctcgtgcaggcctggttcggcggcaacgagtgcggaaacggcatcgcggacgtcctctacggcgacgtgaacccctccgccaagctgccgctcacgttcccgcgccttctacgcgataacccctcgtacctgaacttccggtctgagcgcggccgcgtcctctacggcgaggacatctacgtcgggtaccggttctacgagaagagcgatgtggtgccgggcttcgcgttcggacatggtctttcgtacacgagtttcgcgcgcgaggatctgcatatcgacactgttcctgaacagagtaagtatgcggagtctggggaaccggtgactgcgtccgtgacggtctctaatacgggtgaggtggccggcgccgagatcgtgcagctctggatcgtgccgccggagacgggtgttggtcgtccggtgcgcgagcttaaggctttccagaaggttttcttgcggcctggtgagaggaagacggtgcagttggttgttgagaagaagttggctacgagctggtgggatgaggagcgggagcagtggatttcggagaaggggacgtatcaggttcttattacggggactggcgctgaggaactgcgtggtgagtttgaagttgggaagacgaggttctggctgggtctgtagggctgtggtatttttgtttgtgtttgtcgttataagaccatgtctcacgagtgatgttatttttaatctgtggatgggctaggttggcttggcatatggtcatacgagattttaatccacatgtttcggtattttgaattggattttctattttattgtggacttcagaaaaagtgaagcagacctagtgtttaagtagaaagtgggtggtgcaggctagagagcgatgcaatggttgggttgaaatgaacataactgacatgaagctgcgaaataaagtaacaaaatacatgaacatccccagaaaccagcaatagatatgataaatggtacaagaacaagaaaagacaagggtatctacatagaacagaatagacacctaatatcaaaagccacgaatacgcctcagggcaaaggaatcaaaaaaaacacctcaaatccctgcaatgcatattgacaccacaaacctcatgacctgctgccatcaataaactcattcccattgtcattatccttcttcctccctagcccagccaacttcctcagcaagagcgaagccttgttccgccggttgtttttcggagaaccgggcatagcaacagagtaaatacgctcctggtacatatcatctgccaagcaagaagacgagtaagacatgccacggttgggatcggcaaacggtggatataagtatccgccaggggaatcttcctcattcgtcgaagcactgcccaatctcgagatacctgtttcgggtctcgacaatgtctctcttccagagcctagtagcgaatccggtgtgactttgccgtggacattcaggtcctgttcctcccaataatccttcggcggccattcacgggagcgtaatgaccctgttgttcggttgcaggaactgtagaagcgcgccattggctttgcctgtttggcttcggttggcgcattttcgtcgatgagacaggggatgtctccgctcacgtgaagccaggttcggcctgtccagccgagaggtgcttcgtgtggggagatggccggggagaatgtctcggggatcgcatttgtgtcggtggcaatctcgtgtggatgtgtcttgagctcggactcggtgacttcgaatcttttgtcggtgtcattgagcgagctgactgggctgtggagtgttgtgggcttggatgtccatgtccactcgctgttcatttggagaggactgtagaatggaatcaagcttggagagcaagctcgccccctttccttatcttcgattgttacttctaggctctggccccgggagcgggtccctggtgatgggctatgtggcggtgaggcagagggttgtttgttatagaaccgtgctgaaatgttggtgcccgacacgctgttgcccgacggtctccttttttgactgggcgaattgatcataccaacgccggaatcatgtctcttggtgctgtccgcttggagattgatcgccgacagaagaacgacatgctgttttagagatgaaggagctgcgtcgacactgggctggggattttgtccgactgtcacggcgctccgataagacaatccagctggcattccacggtcaatgctgtgggatagcatagcgcatgcatgcttgatatcatcttcgaggtcttcttcgatctcttggcggtcgataaacggtgatgcaggacggaagtagcccggctcatctgtgaaactgtagcccccggagggaccagggtccctgtgccatgtgggctcggcgtgggtgggagactcggggtttgttgctgaccggggacgactgctgggtgggctgacttcaatgggcgagaccagtgttggttccagagcccgcgcggagttgcttctggtgaaggtcagacggtggcgtatttgagatgcttttgctgatagcttgcgttccatctcgtaacggtttgtctttgtttgtgtctgatggtcaagcaaacaatgaaaacgaaagagagatagaggaaagtgcgccgacaatcagtgaaaatggccactgattccagggcagtccactgcagcccaaacgactggctcagatcagatccaggcaatttccaaactatgtgaggtcgtaagagggaaaattcaagaaccgttgtcggcacaactgtctggtatgcggggggaggggaatgcagagcaggaacatagtagaagagagaccctgggaatacgagataataagaaagaaaagggaaagatagtgatcttactagtagttctgcacagaactatcgtccacttagataacactcgatatcccctttcgggcctcgttcctgatttctacacaataaaattggaaaatctaagacattcctatccaaagctatctagttcacccggctaaaccagttagataggttaataacgcccatatcgaaaagggtctaagcgcccagtacacatgtagttagagcagcgtgctagtgtgactcaaatcgaggactttttgcgccagtgacatctagacgagtcttcgcagcagttaattacttgaaccacggtttatcagaaacatggcctatagaccaggtgtatattaggtacaacatagcctgcgtacctgaatccaaccgtaattaatagcattaacagcagaataacaaaagagcagagcagaataccctgggccctgaaaagccccgggccgccacctaatcttgtttctgaccattcagctcgggccaagttatcttcgccctggagctacggagttgcggatctacgtacttttgtccaggtcatcttctttgtcttcttttctgatttatttttctaaataatgcgtgcatgtagagataaccaatggctatcaataccgaaaacggacccatcactccccgaggtatcctcccgggggaaattgacccggtgggtcggatggagagcagttggatgcttctttgacagtcttctcggacaaggacaattaccaagtgagagacgggagaggcagttggatgctcatctccctaactggcggaatggaaaaaagaacggcaaccctacttcccctgcgccacgacatctatccggtcgcggacccctgcacgggattctggacccagttagagcatgggattggctgcagaaatcactgcgcctgacaatactttttttttttttcgccgctttaccaagcggtgatatcctccacctcggcctcgccgaaggtgctgctcttggtcagcttagtgacactggccacagcggcaccatcgcctgacttggccatgatatcgggcaggacttcgtggaagaattcgacgatgtggcggttgacttgctcaaattgaagcaggaacgcgtcgtggccctcggggctatcgatgcgacggaggcgagaattggggatgccagctgcaacctcttcttgttccgcgaaggtgaacagaccatccgactcgataccgataacaagagctggctgctctacgcgtccgagcgcctcagctacagtatcctcagtgtcggcgctggaattgccgcgccggcgggacacgtcatgcgtgtcgagcttgcgggtcatggcgatgtagcagttggcatcgaatcgcttgacgaatttgtcaccctggtaacgaaggtatgactgtgcagagaagtaggtcggaggacgaggacggccggatgcagtcagcttgggcttttcgtcgacctcaggggcgaatgttttggtgccagagaattgcgggtccatgaactggacatcggccttgtttgcaggagccggtgagccttgtctgctctccgaacgtgaagttgtcccgccacggtgtccgtcgttgtggatggcccagtgctcgttcgggggagtggggagcctctcggtgccgttgatgttccgcggcttggttggatccggtacattgcgaccgaaccgagactcgaatgaattgcggctacggtaagtgaggagtgctgacatgcgagcggcaccgaggccggtggctggcggatcgttgaacgcatagtagccatcgtcatacttcgggtcactgtagatgctctgtcgctgtgcctcgccccaactaatgcaccacgcggaatgacgcgccgaagtcgcaatgggcacaatagctcgcacatagtctttgccgaaaaatgcgtattccaaggtgagcattccacccatggatcctccaaccaccgcagcaatctgcttaacaccgaggtcgtccagcacgagtttgtggatgttgacatcgtcacggacagtcgttaaggggaactcgggtccatagtagccattttcaggcttaccatccttgtaggtcacagcacttgcactcccgtacgggctgcccagactgttaaggcagatcacgaagaaccgggagacatcgaatgcttggccaggaccaccaagaagaggaccccaccagtcagcgacatcggcactgccactaagagcgtgacagatcaccagcacattggcgccattaggagcgagtgttccgcgagtggtgtatgcgaccgggacattatgaagggtaacaccggattcaagtttgaaggacgggatgatcgcaatggattgatcctcgatcaactgggcataagggttctcaggttgcgaatcgactctctctacgggatttagtagcggttcattgggaagaattgggagggatagagtggaggatagactgacggtattgcgcagtagaagcactgctagtatcagccattgtgaaagacaacaatttgcaaaatgaagaaaaacacgaattggaaaatgagaacaggctgtacttgtaacaaaatcgagtgagtcaaaacccccgcgccttggaataacttggcttccggtcccgctggcagaaaataaagcggtatttagtcacgtgcgccacatcacgtgccactagggctcgctccacacttgaccttatttttcatctgtgcgaattctcttcctccgtagccaaccatccaacaaaccttcttacgagccaacccctcaaaacattcaaaatggtcaagactaagaagtccggtgacaccctctcctcgcgcctggcgcttgtgatgaagtctggcaagggtacgcagcttttctcgatcgcacaattgagcaatttgctaacattttctctcagttaccatgggtaccaagtccaccatgaagactctccgctctggcaaggccaagctggtcctcatctccggaaactgccctcctctgcgcaagtccgagcttgagtactacgccatgctcgccaagacccccgttcaccacttcaacggcaacaacgtacgttccattcccctttccttcgggtcggcagcctgaaaatggctgtcgcacctcggagtcagctacactactcagagaagaagtggtcaaaactaccacttcggagagtgaagttgctcagcgaagggattgccgaaaggtgtcccggagagcgaattggactaactcgccctatagattgagctcggtaccgcttgcggtaagctcttccgctgctccgccatggctatcctcgatgccggtgactccgacatcctgagccgtgaggcttaagcgtgtcgccctgttgcgagccataaaaatagaatcttgaaccattcttgaacaaaattttccacatgaataatgatgaatcacggatcttccaaactaggcatattctagacaagtgccaagatactggaccgcttgttaaatgcgcttgtcctcggactcgccatttcatagaaatagcctaaatgtaataccaaaaatgcattctattatcatgagtctggccgttcatgtctaaattagaccttatctataacacctatacggcttcgtggcgctgatctcgatcctaagaaatcagcattgatgtccgtgccagatcaatccccacgcaactccgcaatctttgcggggaagcactgtaagtacatacagcctgtattgcttggcttggacagaccactcatttagcctgaagttttccgaggaactatgtgccaccgacgagtctcccgatgttcacgagcagttccatataaaggaggaacttgatcttcagtgagtgatcaagtatgaccagaaactttggctacaatgcgtacacttctcttttttgtctccttgggctttgcagccgctgagaatggcctcaatggctggctgcggtacgcatcattaccctgttcaggccaatgtcattacaatctcccttccagtatcagcatcctcaatgcgactgagacaagtccggtgtatgttgcagggacggagttgcagaatggtctcaagggtatttatgggaagagtgtgcaagtcacacacaactgcaatatatcctcagtcgttgttggcacggttgatcaatatcgcaaaagctgtggcgctgtgaacagtgtacctgaactggaagaagatggcttttggctcgacacgaaagggggcaatgtccaaatccttggacaaaatgagagaggtgctctctatggcacctttgaatacttgtcgatgcttgctcagggaaacttctccaaggtcgcctatgcaaccaatccttctgcaccgattcgctgggtgaatcaatggggcaacatggatggaagaatcgaacgcggctatggcggcccctctatcttcttcaaggacggtcaaatcgtcgacgacctaacccgtgttgctgaatacgcccgccttttggcctcgatcagaatcaatgctgtcgtcattaacaatgtcaatgcggatgctaccctcttgaatcccacaaacctcgacggggtggctcgaattgctgatgtcttccgtccatacggtatacaagttggtctatcgctcaatttcgcatcccctcagacttatggagggctcagcactttcgatcccctcgatacatctgtcatcgcgtggtggtcgaatattacgactcaaatctatgatctagttcctgacatggctgggtacctcgtcaaggctgactcggagggacagccaggcccccagacatataacaggaccctcgcagatgcagcgaatcttttcgccaaagaagtccagccctacggtggcattgtcatgtatcgtgcgtttgtctacaatcagctgaacgaatcagtctggacggatgatcgtgcgaaggctgccgtggaatttttcaaggatctagatggagagtttgacgacaacgtggtgatccagatcaaatacggccctatcgatttccagatccgtgagccagcatcggcattgtttgcaaatttgttcaataccagtatggccattgaactacaggttacgcaggaataccttgggcaacagtcgcatttggtctatattgctcctctttggaagaccatattagacaccgacctccgtgtcgaccaccagccatcattggttcgcgatatcgtggctggtaaacggttcaatcgcagactaggcggatcagcagctgttgtcaatgtaggcacaaacaccacctggcttggtagccacctgtccatgtcaaacctatatgcttatggtcgcttggcttggaacccggcagacgatgcccaggacattctgcaagactggatcagactgacctttgggctggaccgcaaggtactcggcaccatcactcggatgtcaatggaatcttggcctgcctacgaacaatacagtgggaatttgggcatccagaccttgacagatattctatacactcactacggtcccagccctgcctcccaagacaacaatggctggggccaatggacccgcgctgaccaaaccagcattggaatggatcggacggtggcaaacggcacaggtttttcaggccaatatccggatgaaatcgctgccatgtatgagaacatcgagaccaccccagacgatctcctactctggttccaccatgtgaaatacactcaccgtctgcactcgggcaagaccgttattcagcacttctacgacgagcactaccgcggagccgagactgcacagaccttccttacgcagtggaaatcgcttcatggcaaaattgatactgagcgatacaaccatgttcggcacttcctagactaccagagcggccactcgattgtatggagagatgcaatcaatgacttttattacaatctttctggaatccctgacgagtccaagcgggccggccatcacccgtggcgtatcgaagcggaagatatggagttagatggctacgaagcttacaccgtcagccccttcgaaacagcctcgggctcagttgcaattgttacaacttccaacaatacagctggcaccgcttcaaccaaaataaaatttccctctggcacctatgaccttgctgtgaattactacgatgtatacggcggccagtcacggtggaagatctatctgaatgatcacgaaatcggccaatgggttggtaatagtgaagatgtcttgagccacacaccttctatctatttagatggacattcggcgattcgtatcaagttccggggtgtcaagattcataagggtaataccttgaagattgtcggtatgcctaatggcactgagttcgcgccattggactatgtggctttgctgccagcgggtattgtagattagaagcactcttgtctaccttggctacttctctaagtgcagtgtttcatccaactaactactgtatgacaatcttctgaagaaaagtggtggtaatgaagcaggtagtgacacagtttatacaaagcaaataatgtaccacatgtgtaacattcaaaatctttctatccactagaagtactatgtagtctcagttgagataggaagcgaagccatcctcctgtaactatcaatgtcccttttctttctgtgcgtcttaaccgtatgaccgcaatgctagtttacttcagccgctggtttatcagtctgctatagatagtcgatttatgtgcttgaacaaacctatttggactttcttaaatctctctcaaatctctcagataggtcttatgtttcttgattgtttcaaatgattgagaggaacttatacgttgtagttgtccggttaaattgttcaatattgacgctagtccatatatggctagcgtcctacatcataggcgcgcatttccatttccatcgcgtccccatattcaatccctgcgctccaaccaattgtcttattccttctgaaataagcaactggtctcctctcatacaaagttgaattttcccatcgacctttgatacggagaatttgtcatcatgagtgactattcatcgttgaaagtggctgatttgaaggccgaatgcaagaggcgcggcgtctctcaggctggcctccgcctcaagcagcaattcattgacaaattgattgagcttgactcacagacaaaccaggttacaactgcagaaacaactccagcagaagaatccaccgcatcacagccatctgcgccggatgctgtttcgcaagcgacgtcgcagcccgaacaaccagagaacgaacagcttgaacaaggaaaggatgaatcaatctcacatattggtgaaataacagcacccgtttcagtgtcagagcaagctcaaaatggacacacgcaggcagatgagccgacccaagcagatgaagtttcggcagcagatgggaaatcgcaaaaagttgaagacgtcgcaaagcctgccgagacacaaacagagacaattagccctaaggatcacagtgttgcagccgcatcttcccagccaccaatggaagaagcaacccaagatgcgaagaacgaggaccctgcgaacgctcacgaaaaaccgatctccactgcccagacttctgagactgacacggcatctctcccagtagaagaggcattggaggatacacgcaaacggaaacgccgcagtcagagcccggctcctagtctagaggagattgcgaacaagaaggctcgcgcaaaggaaacaaccccccgcgcgttgctgaaagacgatgaggtgtctgcttctcgcgacgaggcgctcggcgatttgaagcctgaagaccagatttcaacagagaaccacacagacaagcaacctatcgagacccaaacagattcacacaaaactcccaccaagcaagatgctcggttccgcaacctatttgcacctaccagtgcatcctctcaactcacctctcccccgggagatattacaatgcaagatgtagaaataacccctgcgttgcaccctgcaacttctgccctctacatcgacggcctcatgcgcccactccagccgactgcactccgcaaacacctagccagcctcacttccacccccggaacccccgattccgatgatattattgatttctatcttgatgctatcaaaactcactgttttgtaagcttcaccagtatcgcggccgcctcgcgggttcgttccgccgtccaagggactgtgtggcccaacgagcgcaaccgcaagagccttcgagccgattttatccctgacgagaagatcaaggaatggattcagactgaagagaaatcccgagaccgcgctggcgctgctgcccgttgggaagtgagatatgagaccactgatgacggaactacggctaccctcgccgaggtgggctccactccctctggacgacgtgaatcaggtttcaatcgtactcctcccttgggcccgcgccgtgatatggaacaatatggccgtcgcccctcatatgcgcctcccgcggctcccgcggctcctgtcgctcctgtggcccctgtggctcccgcaccctcgtcacgacctggacagggcttcaagcctctggatgaattgttcgaatctaccaccaccaaacccaagctgtactaccttcccgttccacgtcccgttgccgacaaacgtctggaccaatttgatgagctgattaagaagggaacattcccacgtcctggtggcgacgagatgcggcgaattactttcgaagcagaggataagttcatcgacatcggccccgaacgatttggacctggacctcgtggacgtggacgtggacgtggacgtggcggacggcgtggggattcctggcggtcttgaactttcgaatgctcaaagcattgccattggccatgtacaatagactcctagcgtctgcaaataagaatccaatgtcaaaaaatatgtagcgccctgtattattcgcccaatacaacatatattgtacgtgttgggtccactcaagcggttaaaaatagatcatagccctacaacataaagaccctttcagcttccggtgatccctaggatatcggcggattatgaagagctgccagattatgcataaccagtccacaacgtcatctcctttcctcgcttactccgggcttcgtatggaaatagttgctgcttcaatattttcttgttgatcaccggtggcgtcttcccctgtcgatccggataagaagataaaggggaaaaaaaggttcactccgtcaaccgtcctctttgccattttcaccctagcagccatcatgggctggccagtgtgtaataccacagagaccgaaacaagtgtgttgcccctccccccgcgccttaatagggtgactgatcggaaatagttgaggagatcgcactctgggatggtggcatttcatttcatctcctcgcgctcttggtgggcggcgcttgcgctattatcgcctgtcttgtatctttcgccctgattatgctacatgcgacacattacagcaagccgatcgaacagcgacagtaagtgcgcctctctagggtagcggttaaggcatcccaaacattgctgacatggtcctcgtccccgcagtattatccgcatcctattcatggtccccgtctattcccttgtcgcatggcttagcatattcttctaccaggactccgtctactttgaggttctcggcgactgctacgaagcgttctgtatctccgccttcttctccctcatgtgccactatatcgccccggatctgcacagccagaaggaatacttccgtgggattcatccgaaagaatggctctggccgttgaattggtttcaaaagacctggggtggcgagcgcctctggcggactccgcgcagtggattgacatggttcaatgtaagatgatggacttgaccagatgtcgggagttttagaatactgatcattgtgcagattgtctgggtcggggtattccaatattgtgtcatgcgcgttcttatgaccattgttgcggttgtcacgcaggcttttgggctttactgcgaggcgtcgctgagtcccgcgttttcgcatatctgggtatgtgaccaagtcttgcgctttatcctgtcgatccactaataacctattgatagaccatcgtcatcgaatcggtctctgtcaccatcgccatgtactgcctaatccagttctaccaacagaccagtcaagacatcaagcaatatcagccatttttgaagatcgtgtcaattaagctcgtcattttcctgtcattctggcagtcagtaagaattttcgcgtcatcttctgataaagtgatttatttattaactcgtatttactttagacactcatcagtcttctagtttccgagggtgttcttgcatcgactgaaaaaatcgccctgaacgatttcaaagttgggctcccggagctgctgatcaacattgaaatggctatatttggtatactccatctctgggccttcccatgggagtgctacgccctctataacctgccaagtgaagtgaccgatttctacggcaacggcaaggtggcatatcaaggtgggcgctacggtgaaagggccttgattgatgccatgaacccattggaccttctcaaagccatcggtcgaagtgcccgctggctgttcgtcggccgcaaaaatcgtatgctggaccccagttatcacgtacaagaccagtcactgggcctccagccaccccaagatggccgcgaactcacccaacacggaactggcacgcctggaggcgtaatgggccgctatggggaccggccctacgaagaggacgatgtgcttctggccaacgcgcaatccaaccctgagatatcgctcacgggcacttcgccgtatgcgtcggacctcgatgagttccaaaacccgccaacaagattctacgagcgaagcccgtcatcttatgacgattccagtcctgacaatctgcagtcggaatcgccgatccgcgtttcctcgcccaacggtcctctccgcgagcaattccctatacccattccggatccttaccatcctcctcctccgtatcatcattcatgatccatgtctatgattcaattataactcagtatagacaacacatcttatattggcagggcttgctttgtatgcatgtttcccctgttattgagctgcagatttggttcttttacctcacgctacccatgagcacttcgagattttttgcgcttctacttttttctttttgtcccgttgtttggataggtatggatacccgcctgttgcatagcggcatgtttttgttttttttttgttctattcttattcccttattcctttcattattctttatctgctatatccccatcgacgcacattctcctagtatcgttgaggttatatttcttgtatagtatcgtttgggcttgacttctagtgtcaccgattggacaaggaaaaaagaggaagaaatcatatcgaagttcgttatttcgtctaaatggccttgaatgggccagaaatgaacactgtctaagcaaagcaagtgaaagacaaggcccaagatccggcatattaccatttggggggtattttcatgggctgatcgtggaaacactcaagaactggctatcacgaatacatcccacttccaggacctccacgcccacctgggccatagaaatcctcattgaagcccctttggagcatggaggaatccttgcgcgcggtggctacgtgacgcgcagtctggatgactgcagatttgcggcccaattcgcgcatagccttgacgttgtcgccaagttggccaagtagtgagatcaataggacgtcgttgctttgcgagagtacttcggtggtgaaggtgctttgctctgacggagaaaggatagagaggtgcgagagaagagagttgacgttgcggaggattgggtgtgacagcttagtggcggatgtattttcctttgatcgatctaagctgaaatccgcctctgagagactggagaggtaggatttgatgagggagatgcgggattcgagggtgcgaacggcattgagacgagtgctgaggcttgcgattacttttccatcggttagtatcaaccatccatgctgcagttgtgttgagactgtgaaaacttacactcttcctcctcttgtgagagttcaacctgcgagctctgcttatttggctctttctgttctttctgcttcgcacgcttggttggctcctgtgtcgcattcaaagaagcggtgccagaggcctggacaatagtatcgataccaatcatctctgattctcccgtttccattgagtagggcagctccctgaatttgatattcggcaccgactcctcgccatcaacctgcatgtccttgcttgcatcgggggcagtatcgccttcatgaacactttcgtacacggttaggggaagtttgccgctatttgaacttgaagcctggagctgtgaagggtggaaggcgaggaagacggcagattcgttgtagtcctggaggatctgtcgatggagggggagatgggcgtcattgggtccagtccatggcgcggttgaccaccatccaacaaggtcgagcgcggggtctttgtgcacatccttgactgtaatatggtcagtttgtactcgctaagaggagacctaattgatctcgtgaggggtttcgcgtacactgctgaagacgttcttcaaaccatgccgccggcaagataatctcatcgttcagtccacaagtaactggacactcgaacgtttgctcaagtgttatctctcgtccattctgctgacctaaaagagcgccgattatcggcccatgctgctgtcgggcagcgtgtcgggtaatttggtcggagacagtgagaagaacgagtgggtgtagctggatatggagacccgaatcggatgacttctgagaaactagactctgtggaggctccatgactgtaggcaatcctgggatgcggaggaacttgtggtgaatgactgagtagtagagacggttagtcgatgcggtcatgtttggtcggcttggtgttgatgcctgaggctgatacgagctttccccgcggcggaggcgcgaaggacgagcttcacctgtcacgaaggcgtccatctcagtttgaagtctgtgaatggtttttaaaagaactgaagatatcccaagaagtcacaatgtctgtcccttcaacctttgatgcagtgaaatcacacctcgctcaagtccaggagaacccctccacggctttggacattcctctcatcgacaagttgaagttgcaactagtcgaaaacaccgaccccgtagtccctgccactcttctgtcgcaaatctcggcgctccttcccatcttgcaagaagaccctacgcctattacaactctcggcatccgagccaccgcctacttcacattcaccaatctccaatctatcgatcccccgatcaatcttgtcgctggcttcaaggccccatcaccaccaatcaacctcctagctctttcactgttagctaaagccgggcagaaatacagtgaagctgctatagttgctggtgattcggatttggtggcttcactcgtggagctatggctttcaacatcttcgggcgaagtcgcacaggctgcacttgacacattatgggcgcttttggaggttgacgttgcgaatcacctggaaactggggaatatgagcatactggtaatgcaagtcatgcaggacagggactattgtggaggagggtattcactgataaggatgtctacggtctattgttcgggctatgcagcctccagagtgatgcccctggtgatctttctaaaggcgaaagaacgatcgcacagggcaggctgatgacactcttagtgaaagccggaagattacgctgggacatcatctcaaccacccaagtaccggaaatcgaggccaaataccagagcagtagtctccttcattttgcaacctgtcatatggtccaagtgagcgatgtcttgatgtatatgacactgctcaacttcttccgcgagctgctagagatcgatggaccgggcctcgtcgctcgaagatctgtgcagtctacttcgactttttcgtcccctgccctcgacttccttgtcgaacaccaactgcattctaaagtgctgagttattatctcgatgagtccaagctagactcggtggatcttatctacctatccggcccaatcatggcatatgtggctcgatatgccgagatgtatcccaaccacttgttgcagaacccctctaccctacttgacgcgattatctcccgcatcaatagatccctcgccattgctagtgcacaatgggcacacggcgaagtacccacaggtcaccttgctattttagcttcactgccccgagtgcttctcgtagaggcaggtatatatggtgccaacccggttcttgcaattcccacaaaccctccgaatagtgaagctctgggcgttctggcgaaaattttccacggacctcagcgaactggaatctctgattcaatgaacttgaacacatccggctcaactccaactgactgggaccgcgaagcagccgcagcgcgcatcctctacttcctctatgtcaaccaacaccccactttctgggacaatgtcgtgggtgctgccgacgtcctagtgatgaaagatgttgctttgtcggctatttctttcatgggggctattacaacagcgaactggaaactctcaccttcagcacccgccaacaccgattcatcgcggttccagctgccctccgaaaaggatctagatcagctatccccggctactaatgggtttttccccacctctggagcatgggcagttctcactccacctgccctaaccacccttcttccatatcttttcaagccacctcgctcctacgctgatttcgtcgggggtggtgcagctgattcccagaatgtcgtttggaaagttgccactgcgaaacatgatgttatcgtagcgctgcacaaccggttgcaagaaacagatggccaagtggaagggtttgaggatatcatgcgaaccctccaacagcgtgtgaacgagggtccccggggacccgtacaatttggcggtgctgaagtaatggctgccgggctatgaagtcgcaataaatttgaaaagcacatgaagcggtctagtttgttctcgtgtattctttctcgtgttcaattaagaacaatatcaagctcaagtctattgtagatgtactccgtagagatctgcattgttatcttagcgcggggaagcatttagagaatctgccagccctagtgctgtttcgggtgggcggtgaagaaatatatttttccggagtcatcatctatccgcagttatttcatgaagaatattccatattcgctaacccatagtaagtgacgttttattacggcaattatgtcacgtcgtggggcgccaaagggcaagaaaccccccggcacagagtttacttgggacgccgaccctggtggggagccagacacagctccaacgccgttataccctgtatgtttgcttcttggcctggctctccaggaaattttcatctttcaatccaatccccaccatgtcgaaagctacagagcctaacgccctctttcctcagaaatatactgtcccctttgctcggaagttgagccccgcggaacaaacccaggtagactactaccgagggttgcgcgagagctttcacgagggtccctactactctgttctcgatgcgtcatcttccaacgccaaaaaaggcagcgctgcgcgcgccaactttgacgctttccacggcatgcccgcttattctgggcggtatcaaaagaaacggcgcactctccccaagatcaccggacgatcttattgtaagttatttttaccagcgttaatcatttcttttccacggctgcatatgactaaccccgcatgcttgaaccactcagtcttgaaattcttcccccgcgagctatggcaaaccctccagccaaacttccgacccgacgcgtccctagatggctaccaggcccaggtttcagccgctgtagtgaagcgcggcttcgaagatgaagaagacgatactggacctgcgaagcgcgtagctgtcggcgaagacgaggatgagggcgatgcagatgcggacgaagccgcattgcttgatggggatgatgaacaggaagaggaaattatggacgacgacttctccgacgatgatgatgaaatgggcggcgattacaacgccgaacagtacttcgatgacggagaagacgatgtgggtgatgaagacggtggaggtggtggcgacgatgacttctgaaaagcagattcacgatacccttttttaattttcaatttagccttactatggctcttcagcgatctggtttatgcctcattggcatgtcctgtatatctatccaatgccactgtgaattattcggtgtgctgagcgcagataactcccagtagcccaggcttagacctaagattcttaacataatacaatcatagaattaaattatcctcaatgtctatatattcaaggtactcttacgaaacaatgcatccgatataaccttccgatgtcggtggtagataaggcggtgggtattcgataagaaaggttgattgggcttttgatgacgtcagccgatttttggaggggcaaagcagaaattgttcagacacttccacatcagagcgcagaatgggcgacacccaaagtctacgtcccttagaacggtctgtgctcattctctatggctccgaaacgggcaatgcgcaggaagtggccgaggaattgggcgccttgactgagcgactccgttttgcgacgcatgtatccgagttgaatcaatgcaagccggtatgcacttatccgcaagacaatgatcctctacagacctaatacctctgaaattataggagtcccttttttcatacacactcaccatatttgtggcctcgactaccgggcaaggcgatttgccggccaatgcgcggtctttttggaagtcgctcttgttgaaaaagctacctgctaccttcttgaatggcataaatttcacttgttttgggctgggggatagctcgtatcccaagtatggaacctataccacaattgtggttttcaatggctgattgtgatagattcaactgggcgatacgcaagctctataaacgactattacaactaggcgcaaatgagatctatcccacaggcgaggcagaccagcaacatccagaagggtgagtactatcttgatcttcacgctatatgtccacgacttacgtgggtttgacacacagactcgagggaactttcctaccatggatgacggacttccgaaaacatttgctagatagacatcctctccctgatggacagcacccgatcccagacgatgtgcagctcccaccaaaatggaagttgcaattagcggtggaaaacgattcggccccaataccccaagctgcagtcgcaaatgaacatcaagcttctacggatgaatatccgggactataccatctggaccatgactcccgacctatcccacatacgctatgtgcgacattgactgaaaatcggcgcgcgactccgcaaaagcattggcaggatgtgcgccacattaccctgaccgtcccaggccttgtctcttacgttcctggagacatgatcgccatcacaccgaaaagctcttcgattgatgtccaaacccttattgatttgatgggttggaacgatcaggcagatcgaccaatctctctcgttccaatgggagatattccatcaccgccacccattcctggcctcgactcatatcccaacctcactcttcgcgctctcctcgtagactatctcgacgtcaagggaataccccgccggtccttcttctcgacgattgcacattacaccaacgatgaaatgcacaaagaacggttactagaatttacaaatccggaatatctcgacgagctatgggattacacgacacgcccacgacgtagtatacttgagatcttgcatgagttcgacagtgtcaaaattccctggcagcacgcaatatctgttatcccggccatgcgcgcccgccagtttagcattgccagcggcggaaaacgcaagcagactgctgatggcaatacacagttcgaattactcattgccattgtcaaataccagacagtaatcaagagaatccgcgagggagtctgtaccaagtatctttccgtgctccggccagggagcacccttcaagtccagctccaacccggcgggctcaagtcatcagttcagcaactaaccgcagcaaccgtgcttattggaccgggcactggaattgcacccctgcgctccatcctctgggagaaagcggcacttgtgcaggcttaccgcgagcaaaaccctgacgtcaatccaccgatcggcccgacaattctcctatacggaggccgaaaccgagaatccgacttcttcttcgaggaagagtggacggagctcagtaagctcatcccgctgcaggtgattactgctttttcgcgtgatcagcaacgcaaggtctacgtgcaagataccattcgcgagaacttcgcgctcttcttctgtgtgttgcatgatatgcaggggtcggtttacatttgtggttcctcgggccgcatgccgcaagctgtgcgcgaggcgctcatcgaaaccttccaaaatggaggagctcctttgccggggcaacctttcacccgttctcaggctgagggctatctcattagcatggagcagactggccgttacaaacaagagacttggtgatcagtttgaatacttggtttacaccacagcatagtatgacattttctattgtacatctagttgtacatctagttatggaaagatgcccttggatatgtacgtaaatcagataggaggtcacaacctgtatctacaatgcgatgtaatgtcaaagcttagacatttactcattttacagctcattatcatgaaaatatatatctgtctatcttgcatgtatttaatgatgacattgtctactctgtacctaaatagctagatgttgttctctggctgcctctagctttggtatacaatgtcactcttgtccaaattctttaacagttcaatggcggtttggccgagtgattcaagatgattcagtcacatgtggtttgcggggatagctcactagagaactacacgaaagacatatatgttagggctaggcgttgacacaactatacaattcatgaccatatcaacagactacagtagactattcttctcagtcttgtcaaatgcaaaacaatatccatcatcacaatatgcaaaccgctggctgtatggttaacctcggcaggtcggtcgtgtgactacggcggagaattgcggccgtcggtaacccatatcacttctatagctagttaaccgccgcctttctatatttcgtggttatttcttaagagaaattgcttgtgttcgtgagccgctcttgattatatcgatttgattatgaacagaaatggtgatagagcgtgcatgctacatacaaccagctccagtgctccagtggggtgtatagaagatgagattggaaaccagtaacacataataaaagggatgtttttgtgttcaaatgagcattcattgctccgtacatagtttctttgctgtattgccctcttgtatcctcgaataatacaaaaaggcaaggtctatggtataccgccatggcatacttatagatacgttcgttgtacaacagtttccacagagcgttattactcaagggtagataatttggaacggctatctagagaagtctagactagcgtcatatatcccagaataatgctcaacttacctataggatctgcgcgggcggcgttcatgctccgaccccaagcgcttgttgccatagtggccgcaaaaacgagcggtatattgaggaatccgtggcgcgacgaggttaaactcgggccgcgtcggcgttttttacctcttggcactccgtcaccgcacgctttctccctccgagcttccaatcttccttatatcaactcaggaattggctgttgctcgactaccaattacaaaatgagtggcttaaggatattggtgcccgtcaagcgcgtgatcgactatgcggtaagtcaagttcccattcaactatagcccctccaagtacagctttgcgcgaccgtcactctgagctgtacctctcaaccaacagggttgtcatccctccatagcactcactctgggattgggatatcacaactgacaccaaatccgaatctaatagatcaaaccccgcatcaacaaggcccagaccggtgtcgaaaccgctggtgtcaagcactctctgaacccattcgacgagctctcaatcgaagaggccatccgcctgcgcgagcgcaagggacccattaaggtcgaagacatcctcgcactttccgctggcggcccgaagacccctgatgtcctccgcaccgccatggccatgggcgctgaccgagccttccacatcgacgtaccggagaagggcgacgctggcctcgagccgctgacaatcgccaagatgctgcaggctgtcgttaaggagcagaacgtgaacctcgtcctgctcggcaagcaggccattgacggtgaccagggtcagactggtcagatgctcgctggtctgcttgggtggccccaggctacacaggccagcaagattgagattaaggatgaggctggtaccatcgaggttacccacgaggtcgacggtggtgttgagactctccgcaccaagctgcctatggttatcactacggatctgcgcttgaacgagccgcggtacgctagcttgcccaacattatgaaggccaagaagaagccccttgagaagaagactcttgccgatctcggtgtcgaggatgtacggaagttgaagactgtgaaggtcactggtatgtgtttctgggtttgctatttggttcgtgggattgtgctaacattgtgtagaacccccgccacgaaagggtggtggcaaggtcgaggatgtcgatggccttatcgctaagcttaaggagctgggtgcgttgtagatgcgctaagcttgctcttgattacactgcgtttctataccttcgcctttgaaatgttacctactagattggaatcgtcttgcgcatttctcccacagtttctgatgggcatgctttgtggcgaggcatgtgtgcatctattggatgctagatctataaatgaaaaacattctttgtatttgatagtatgtactagtcccactagttccaaacgggttggcgttgtgttcaatgatacatcttccctaagcatatagtcatagttcgccaaagggggccacactagtgcaaaatcgaggatcgcaatccgccacaggggcgctagagtggctagatcttgtctacggactaggaactatgcacgaaataataaccaccccgtataggtatggccatatacaatatatcttactcttccaaccttgggaggtctctttattggcaaaactacccaatcggaactctatagcgcccaatttcatctcagcccgaggcaataatatacaatttatcagccacattgcctaacttcccgattggctgtgatggaatgtcccgggagcctcacagctagaagaacattcttaggattgagtgaaattgcaaaagtactaaggaaggatagtatgattctctaattcccccattaggcttaagtacattagtgtagatgtgttatgagatcagcgcaaaagacgatcttgcattatattagttacccttcacagtgtggatacactagaatatggtggtggcgaaagctcagctgaagtgatatccaatctcaaataactgctagtacaaatacggagtatatagggaaaacctagccgacggatgcgtacggaggcatggccttatagcgtggtcgatcagctcagcctagttgagctgtcatgtatgggatccactggggcttgaaggtggacaggtcaaagaacaaatgaacaatgacaatgtgtttcatgttccgaggtattctattcggcagagaatactgagtactacagcatatcggtatatgtagtcaaagtagtctagaatggtaggaaatgcctcgacacgcgttctaccagggcttttaaattttcccggtgggggtatgaggtatgtgattagggactgactatgtatggattaataagagtactatagatacctacgattcgtataaatacataaataacatacagagtacaatatcgattgtcactgcaaatgcaaaaaccaaatgaaaaaaaccaaaaagcgaaattaaaaattaaaaaaccaaaaaaaccacctgatccgtggatgatgacattgcctcgaaccttggaaccatggaagagcataaccgtccaggccctattaaacccttccgtctgacccggaaatcttttttataacttccttttgcctcgtcagtcgctataatctcgcctttcacattttcgacgaactttctatacatttgcgaacattcctccccgcattcctggcttgcaaccgatctcgcattcttcgatctagctggaaacattccggataagaatatatcgggattcatgctgttcgcggcgcaagtcgtgtttcagatattgcgagtatagatctcgccttgatcagcctctcgcggcgcgaagcgcataacctttgctacttcttcagttccccataacgtcacagcctcttctgtctggcagcaattcgttatgtcttctcaaaataaatgggagaagacgttgagcatctcgaaaaagggctttgacaaagcatgggacaccgtcgacaagctgggcggccccgtcaaccgcctgtcacataagctgggtgccgaagccttctggcccatgacaatcgataaggaagccgacaaagccgcgcgcatcctacgcagtttctgtaaagatggattctacgcccccgattcctcaagtggcaccgatgagaatggaaagatcaatcgccccaagggcagacaacgcgttattcagaagatcccatcaaaagtcctcaaaaatgccaagggagttgccattttcacgactatgcgcaccggtctgtggatgagtggctctggtggtagtggcgtgctgattggtcgcatccccgagaccggcgagtggagccccccatctggtatcatgttacacacagccgggataggcttcctcgctggtgttgacatttacgactgcgtggtcatcatcaacagctatgacgcgctcaacgcatttaagaaattccggtgcacccttggtggcgagattagcgctgctgcgggccccgtcggtgtgggtggtgtcctcgaatccgaagtgcacaaacgccaggcaccaatttggacatatatgaagagcaaggggctgtacgcgggtgtcgcggtcgatggcacgatcatcattgagcgaacggacgagaacgagcgcttctacggcgagcggatatccgtcgacgaaattctctccggcaaaatccgacatccaccttacgagctcgctaccctcatgcaaacattgaaggccgcacaaggcgacaccgacgtcgacgggagtctcattccgccaccgggcgaaacacctggcgatatggaattgacggaagacggacaacaaatctttggcgtgccggctgtggacgaccccgatccgtatggagtgaaggcgctggaggcggaggggcttttcatccgcgaggccggcacgaaagcgaggcccagccatgagacatttgaatttcggcctaacctagacagtcctatttatagcactttctcgcggcgcagtatggatagctcgccgcgtaatagctggcgtgctagtgtgcagagcgccaagagctatgctagtgtcaaccgtggcacgcaaacgattgatgagccgctggtcgagcccacgtctgtgagccgtgcgtcttcccgcaggtcgaagggatcgtctattggccgtcaaccgatgaatacctgggacgaaaatgagcctcattgggatacgattgctatccatggcaatgaagaacacgtgaaggtccgccaattggaaggcgaggaggcggagcataggagagcgaaaacggatgcctgcccagatgcacacgatgaccccgcgttcgaggatgaagacgagcactttgagatccacgagcttggcaatgtcaaggtcacaccaatggagattgtcccagcctcgccgtcgaaggtggaagaccagacgacaggcaagcctacatcgcctagcttcacccgggctcgtctagtcacaatcccggcacgcaccccgccccccttgcctccgcgacaccccggccacgtccggggctctggctcaagccgtgcctcaatgtcgccaacagcgctctcatattctagccgtaacacctcacctacagacgccaccgaggtggtggagaataccgaacatttggatgaaactccccacgccattccattccccgagaccaagacctctccccatgtcactcctgcgagcgatgacgaggagattgtcgagaaggacgaattccactctgtcgacggcgagtcggaggatgaggataacgtcattctcctcgaagaccagattgccacccaggccgccgagcaggagaacaagatggacaaggaagacgagaagacaaattcactcgatgtccccaagcttggacctagcatcaaatatacccccgaggttgaagagaccctcgacgagatcgaagccaagcttgaagctgagatcaatcacattcctgctgtccacgaaaaacatgcagagtcccccgctttgactgaactcgataccaccttgccccatgcccgggctgagtgatcttagattctgagtaactgtttttctgcttcctctttgcgatttcctcggcattctcgtttccgtatttttctcgaaacacaccttggcacgatacctcttacgcattctatacacatttaactcatttgggagttcttggtcattcagtctccattttcatacttcttccatccccatctcatctccaaaaaaaggcttttctttgttggtttcctgccattggctttagcgtgtctgcattttagcgattggggggtattttttttgttcctgggtcaggccgatggtgaaggggttctttgggctccttgccttttactttatttgaagagctttcgctcgagttgcattatatcctgtttcctggacttggaatacgctcttttatatattggtatttggctaagcttgactttggtcggttgaattatataacatcagtaattatccagcgcaggtctattaaatgtacagcagcatgtctcatctcaagtagaaatcatccttcgaatctattatccttttccatgagaaagtagatggaattacccacgtataacttctagaaaagcatagctgatgctgctttagattgagatgcttcagttatgatagcaaagccttctagaggtggaagtaaagacaccgaggtatttatatcagtttgagccgatagagaaggctcgctcacagaagagaacgatcaaaagacagcgaaagtgtcatgtatgaaaataattaacccgatagaaaaaggggtgggttaatccggcggcaatatttaagtgaaccaatcacaggaattagagtaaacctcccggaaaaatggagatctacagatttgtatggcgccaaaggcttcattttcgacgatcatcggacctagttattccgtgccgacattatggtgattcggaccaacttccaggcattaaggctttgatatggtgcaaacgacccctgcgatgctgcctacttttctttcctcttccttttctctcctcttgaccatctcccctcattctctctccttgaccatcttaccccttatttccaatcctccaactgcatgaaacactcattcgataccacagttcgagcgaacctcgagcagtcactccatactcttttccggcttccgaactacaatatttgcaattgactgttcaaagtctcctggtctcccttgaacaaatgcaacatgacttcaagtgtcgcgcgaagctcgaaaggcagcattaagaagtgagcatgatggctggaaatgtttgtttattgttactaatttgacgcagaattcaaggaccaatagtggcaatcacggtcggggcatcaaaggaaccctttcatgtgcacgaatcaatcatctgcaattcttcgctcttcttcaaaacggccatgtcagggtcttggaaggaatccaaggaacacactttcaagctcccggaagatgaccccgaaatctttgctctatatttgcactggctttacttcgccgaaatccccgtgatgcttgaaaaatatgcagcgaaggaagaagcagcaaggcaccgttacaaggagtaccataatttcgtcgatgcatatgtgctcggtgacaagttgctcgatggcaagtttcagaattcaatcatcgatgcaattctcgagatgtgttctacgcctgatgcacacgatggaaggaaatactatcctagtatggcggtgatcaagcatgcatacatagttacgaccgagtctgccggaattcgcaaactgtttgtggatttgtttgtgaacactgcagcagctaagtggctcagcagagaacttccagcggaatttctctattcggttgctgaaggcctcatgattaaaagaacctcgtatggtgggccaatcaaagcatcccagtattatgctaagccctcgttattctaatgtggcaatgtgactaccccgggcttttctgacttcattctgacttcattcatcttcccaccttgttttgaatgatctctaagttagtccaggcaagtagatatataatggtcaaattttgtattcgtttcatttcttgaaagtccgtagctaatccagctaatcggtatattcatcttcgaccttggtttagccagactcattccttcttatagtctgcactggtgtgtctactcgagtccttacccctggaaacatggactacataaattagaaaccgccgaatgaagaatagatgccgtgatatccgacagtcaaggccaataatgcagatgtggacactggagatatgaaaattccgaaaagggaaagatatgccaggacgttacctcgttacctccgctaagtccgaaagcttgtgcaactttatttgaaagtatcatacctgcttgttccaaaaggacacatcctccgagattttcatctcccatcttttcatctccaggctcaaagcatccaaaatgccttcggataaccacatcaaagcagccttgtctctcatcgaggacaagtccaagatccttggcttgaccatcggcaactatgagaacgtgcaacctggaacatacctaccccgcaaaggtacgaagcagtctattgcctgacctccccttccccccccaaatcgtgtgacaggcaatccaaatatgggactaacaaaaaccacagcatgtcaagagcccccgaagctctccttcactggcaccaaccctaacagcacctacatgatcgtgagcatggacatcgatgcccccttccctggcttcggagtcctgggtcccatacttcactggatccagtccgatgtcaaagccaccagcgagggtgtgctggagtacgaagcgcccttcgtcgccaactacatcggccctgctccccctccaatgagctcgccccatcggtacaccttcttcctgtacgaacagcctgcagactttgatctcacggcccatgcacctgctggtggtaagaagcttggcaactacaatcgtatgtggtacgatcttgatgcttgggcagagaagatcaagcttggtcctcttgtggctttcaactattttaccagcaactagctggtttttgatgttaaccgggttatggtttgatgaagtttaaatgggaagatacgttgtttctcgtgatcgttttattctcgagtccagagggatctcactaattgtcagtcaatgaatgttgctttactttgactaaattaatcaataactccaaatttttcaactcaacatcctatactgtaataaggaatgcacatgtgtcttctcttgcttcttgctttggcagtaatagacaggagggcttctcgatgagccactcagcttgtaaatcatctactaggtgatatctcagccctcatacagccctcagcctcaggtttcaatggagaatcccgggggcttgaaaggaacatctgagattgtctttgtttattgtttgtctgtgccattattgcagtgtcatcaatagtttataagggtagtcaaattcccccacaaggaatttctgcgtttaatttcatgggtacttttcttagtgtggtttattttccatcggggaagatggcttccaacaaaccggtagacaagctggctgacaatctgaaggggttggtcatcggcgccagcggtacaatccctggatatcaacatggtatgttttccctcatatcaaagcagatctatggaaagagggagagagacgtttcctagatataatttgatgaatgacacctgttatccagaggaaatcaagcggatggtcgaggaatgtggtgcgaagtttgccgcgataaatatcaacaaatgcactcatctggtgacgacagaaaaaaatgccaacaaagatttgagaaagagttagttgcataagcttcgcattctgtgatataaagtgtctactaacagggtgattttgcttcagtcaatgtggctcgtgaactagaaagctgccaaattgtgaacattgattggctgcttaagaagatcggaaacgatattccagagcatggccagaaaaaaacaatcaagggcgagaggaatgaagagagcaagcccaaaggcagaaagcgtgcgcgagaatcttcagttcgggacgacgaagacaacccttcgaagagaacgaaggatgaagaacagatcaagctcaagtatctgatcagtttggttgatgagaaatacccaaacccgagttagtgatacgatggagtattttcgaagacctttctaacacttcggtattaggtagcacgctctccgtttaccaggacgacaccggtttgatatgggatgccacactggtcagccttggtgtgagaaaagtccaaatttgtcgcatacaacttctccttcgtcgcgagtcacaaaagttccacctgtggaacttgcagtaccaatgcgggtcatccgagacgtcaacatcaattggaagggtaggaagcctcgactcggtcaagcgtgcgtttgaggtgaagttcaagtcactcagtcatctagaatgggaagaccgaaatgatattccttcttctaaaggttggattttcctccagatgcctcaaagggaagttcccgtcttcaccagccggatcagcccgttgcctacaagcgttgaggacgttttgaaaatcatcttcacatcaggagcagacttgaaaaactatgtccatttgctaaacagtcaggggcgcggtatcttgcttgaaaaccaagtggacaagaaaaagctcctgatcgggattgcagtcttggccaagctgatggagctcaccaatcctcagctaaatccttgcgacacttacaaagcgaagaacaaactgtgcaacttctacaatcacttgattctcacacaagggactctttcggataacaaagatattgtcagacaggagttggaatccctcgatctgttactcaagttgcgcgatgccagcgagattctggaaaaagattgccggtcttcttcattggcgatgagccagatatcccaagtagttggtctggcaaaaatgctcccaggtatatatcctttgtgccttcttatagtaattccttgagtgcgttgcaaagcatgaatctgacccttgttgacagtgaggagagattcgacagagttcaagatgctccaggagtatattgagaaaacttcttattcacaacacatttatcaattcaaggtaagctgcgctcaaatgacataagcaaaatcccagtctaacgcattcatattcctaggagatcatcggcctgttccgtctcgaacgtcccggggaagcagagcgttttgcccagtgggaaaaggaaaaccttgctaacatcggagatcggcgacttctgtggcatggctcaaaagctagcaactttgcagggatcttaagccaagggctgcgtggcgacgggattgtcagtaccgatggaaagcgcttccttcctggggtatactttgccgacatgtctactaagtcggcacaatattgcaaagggaatggggaagtcttgatgttgttatgcgaagtcgagctggggaaatccacggctttttcagtccaccatcttggcatgactgtccataataaatggcgcgatgctggatatattcacccagatttcaaggggtgccaagtgccagatgttcacgcgggacgatcaactacaaccccgaacggccggcgttattacacctctgagtatatcgcgaaaaacccagcacaaattcgtcaacggtatttgttccatgtcaagctcgttcaaacgccagggacttagggcgacgatgattgagggattcgagttaactacagaatgttgagattttcctatctggaggtatttagatttattttagttcaatgcaactttagaagctctatatctgcataatcccacctcacagacatcgggtagtggatgaatatgtacaacatagctagggcatcgaatatcaggtggttttgtcttggcacttcccctcccctcacttgcacgagcacgagccacattgacagaattgttgccagggttgtaactcttctctcggggtattcttttgcttcccacagctcgttcacgtcatgattaatttgtggaccgccgctctggtagtaagtgctgccgcgcagtactttccgcccatcccagatggattgaaggtggttgaatcgaagcatcagaagggagtgaagatctcatacaaacaggtgtgattattttgaagtcgttggtatcacataatgtcatactgataaatttcacagcctggaatttgtgaaacaacaccaggggtgagatcatactcgggttacgtccatctacccccaggctctctggacgatgtaaatgttgatcaagactacccgatcaatactttcttctggtttttcgagtctcgtcataacccgaaaaatgcgccattgtctatatggatgaacggaggcccaggaagttcctccatgattggcctcatgcaggaaaatggaccctgcatagtcaacgaggactccaattctacggaactcaatccctggtcctggaataactatgtcaatatgctgtacattgaccagccaaatcaggttggcttcagttatgatgtcctgacgaacggtacctttgatcaggttaagggtgcctggaacttgtcggagtggtccggggtgcccaagcagaacaacactttctacgtcggcacgacagctagccaagataagtcgactgtggctaatagcactgcgaactccgcgcggtcactatggcactttgctcagacctggttcaccgagtttccgcattacaagccccatgatgaccgggttagcatctggactgagtcatacggcggtcgttacggtccatctttcactgccttctttcaggagcaaaacgaaaagataaaaaatggcagcatcgatgcctcgggggatccacactatattcacctggatacactgggcatcatcaacggctgcattgatctcctagtacaggaagcgacatacccagtaatggcatacaacaatacctacgacatccaggccatcaacaagaccttattcggttacgctatgaattcatggggccgccccggcggatgcaaagaccagatcattcactgtcgcgcgctggccgcagagggcgatccgcaaatgcacggcaacaacgaaactgtcaacaaagcatgccacgacgccgacaagttctgcagcaacaatgtcgaaggtgcatacttagagtttgcagaccgtggctactacgacatcacccacaagaaccccgaccctttcccaccgtcctactacttgggctggctgaaccagcactgggtgcaaggggcactgggcgtcccgattaacttcacccaatcaagtgacggtgcctacaatgctttcaattctgtcggagactatccgcgttcagacgtgcacggctacctcgaagacctggcgtacgtgctcgactccggtatcaaggtcgctctcgtttacggcgacaaagattacgcttgcaactggattgggggcgaagacgccagcttgctggtcaatcatgctagtgcttctgggttccggtctgctgggtacacgcctctacgcacaaactcctcgtatattggcggccaggtccggcagcatggcaacttttctttcacccgtgtctacgatgctggtcatgaagtcccggcctaccagccacagactgcatatgagatcttttatcgttcgctgttcaaccgcgatctggccacgggtaagatcaatactgcacgtaatggctcctatgccacgcaggggcctgcgtctacttggcatatcaagaacaaggtcccggagagtccggatccgctctgctatatccttgctttggggtcgacatgcactgaagaccagattgcaagtgtgatcaatggcaccgctgttattcgtgattatgttgttgtggaggaaagttgaagtacctcatgtaagctctatgcattattgctcctcatgtattttactagaacacacgaaatgacatatagaaatgagtatacatcttctataagtgagacttgttgtgacgatgtcctcgtacgttcgatatccaatacactctttgcttgcagcgaaggcgaatatctcaaacataactggtcagatggctcggtggctgagtcaactcaagaaggtcatgaatagcacatgagtggatatatcgcatcttgaacacgataggagaattcgagggtttcacaagctgtcacagcctaagtgtaggttttgcatcgcatggaggtttgcgatgtctaggttcggcccgagccgtggtggcgcccgattcgacggatggcgggtctgaaaaccgggtctctggtttccaccaggtacataccgaggaagtaaagtaaagaagtctcctcacggtctaaagaaccctatggggttacttatatatgtccttgagatattcatatggtcgctgatctgtagagtcataaaacagacaatcatacagatggtaacagtaaccagaccggatcactgtgtttcagtatacaatcaattcacaatgctgtatcctccatgactgaatatgaaaagagcagtgatcttggcattgtcttgattgaaaccattgtatgcactcgtattataatttgggatgagagaattgtgaaagtcaagcatatgacacatatctgagacatcaggtagaacaatgaaactactatatgtgactgcaaactaagctacgatatcatatcctaaggaggaaggcacctgcccagtcccagatcaggtgccttcccttttggtcaaaaaccgtcaccaaccccagtttcctatttacctttagctactgggagggtataaatacctgcctctcccccctctccctcttcttctttctttcttctccaacactccgggcccacattgcacatcgtgttcctgttgagtaccctttaattttttgaacttttgccagctccagattcgtattcaacatacgtctgctgctgtccagtgaagggaaatcctgaggattctgattggaactttgctgcggctcgttgaaggctgaaactaggttggggcttcggtcctggtctaatggcacgaagcatgttacggtagaagcactctccctctgaccactgcggatacagactgtacttctctgagttctccattgtccattaggagcttaacaaaaggggctctgttctcatctccttcctacagggataactctctgttcccaatgatgaaacaataatctgagggtagaacgttccttccttcttcaacccagctgcacgggtcatgtgtgtagcacctgagcaagacttgcacctttacgtggtgttcaggatgagtagcctttacggcgaaaccaagcaagtcattatctagaacagctattaactgcaatattaaatcatcagtactcagtacaacattgtgcttcttgtaagaaaccaccggacattgaattattagaactagtatcaggtaacctgcaggtagagactagcgccagatttcccttgtgtcgatcatgttgatcagtcctatagatctcacactgacgcacctggaatgtgatctcgattgctgcacactacaatgcctaatctctccgatcacaagctacaacagcatctcttgcgacattctctctacttacggcgaaaccaagcaagtcctcattatctagaactgcaatagaacttggtattatatacttgactgtgtccttttgtaaatgcttctgtcgtaacctgtgccttcatttccaaggtttatgtaccgactctcatccatggatatcaaacttcttttcaaactgccacaacaaactgccatcaccacaaacaccttacattacagtgagtatcgaccagtcgccttctcttattcaatcatattctgactcctgaagtgttgcataagccttctaacgttggatattagacaacaaacctttctacccttagcaaattcaaactaaaatggcatttccacaccggttcggctggctcgcaagaccatcaccattttctacgcctcgacagccccgactgagtccaggcaagacgggacggttggtgacatacgatatcacttccgagatgcagtgcccactattcgatcggctgcggtgctgctttgagctggactttatgtgcggatttcaatctacatggggtcttcatgatcaacgctggactgaggatggagaacagttccatcgagagaacgaagaggcagcacgttaagagtcaagacactcatttctttgtttttgacactagctaacttagattcttgtcacagttactccctgttcagaaaccaaagccctgttcagactacgacatccacccggcccttttcctagtccccgacaaatgagacgaacccagccccgaccagagaatatgacagcaaccaatgtcttcatgtaattcaaagtatccatggtctttttacaaaacggtagccagacataccattggcaagaacatgaggccatgactgtgaaacttataccatcctgaggccagccatgacttacgcaaagcaccatattgtacgaatgagttcagtctcattccagaatcctcatttactgattatgaaacccttctcggcggcaagataccattctgaaagtacgccatatttgtcaatcacttgttcaggaacatccagtcctctggcgatgtactctaaaagtcaccaatatcaatggcgcttgcttctcattttcacagaatcacaatcgaagcttgccatcactctataactcgatagtagacttatgcatactgcagttcaattcaatgtcatcaccaggtcatgacggcaatcttgactactctctgaaacaatgatcttttactttcccctttccggaaccacacgcacgcaaaaatccggtcatgcgctaggaaccttatgcatgcattgtcggaactatacggcgaaagtaccctcgtttcttaatgctgagccctggtacacttgacatttgtctgctcttagttcgttcgctctatacctatagttgatagctaggtacttggtcttaggatgcgtagaaatggcaatgcttgtcaaatgagcatcagcacggcatcttacaagttcccaaggaggcagcgggactaaaggccgcatttggatgatgatatccattatttccggcagaggtgacagtcaatctcggctgggaagctgcttggacgtgggcttgttacatagatagacttctgcgcctttggcttttgtacatcagtcccagttggagagtatggtatttttctgtagactacattttagtttgtctatgcgaacataattaagttggaatatcgtgattgtggttctggatatactagttaaaggctcatcaagaacctcgtaagatgagtactctggaatcaagtaaaaagacgggggataaatgtcaacgctattgaataaaccatccatatcataaaccaatcattccttcttatcatgcgcagtctcgaccggtttactaccaacgccagacgaccaagcaacacgagcaagccgccaaagcacccagatgaacccaagagagatcaccgcacaagtaccaagctcgatatatttaccctggaagtagccctcctcgccctcaagtcgtagaaccggcacatcgatctcctccacaagacgatcacctgtaggctgaagctggtagaatagggttcgcggaccgaacaagctgtcccagcctagatgtgtgcggtcgaagggattcacactcatcttcgtgctgtcctcggaagtacaagcccagaagacgacaggccagggaatgtaagctgtgcggtgtcctgtttcggatggtggcaggtaccgcaggtgcagaggaatggtggcagtccagtttgaggaatctggtgtgttggccgtttcttcgagttctgggggtgttgctagttcgaagagccagttggagccccagcgctgaacaacccagtctggggcttccaggtccatttcgcctgctaaggcttggagggctaggagattgtgtgactcgaggaagagtggatctgttgtcgcgagctggtattgatcgccaaatatgacggaggggagggtgaggtatgtgtgcagaccgcaggttgtgtcgtctggtgctgtgggtcgtttgagggatgaccgaggcatggatatagacattgttgggtgaagaccagtcggggaggcgaaggagacggtgtagctcgatggttcagtgagagattggtgacgggaggggaatgagaacatagttggttctgtatgatggttagacaaaattcaagcgatctgataacgccgaagccacatacttagcttctcgtcctctccgacaaccgctaacagcccgcccatcttgatctcctctggctcaagccctgcctcggcgcccaagagaccgaactcgacttgatcgtcagcggaggctggcctttgaaacttatccgtccaaccgcccgtaggtgaactggcccagagcccagacacagttaaggcgtgtgaagtgctgtcatagtcgatatcgaccgagtccgcagagaggagagcatcggcccgggtgtggcactcgcggccacctgtacgactctggtcacagacagtgttgtgaatatatttgaccagcggctgtatggaagggagtcgggtgtaatattgtagagcggccgatgaaccgaatcgtgttgaaagaagcggaggtgtaatgaacgcatcctgtgtagcagattccaagtcagaatgaacacatgcaagatatggccagggaaagccctcgaaagaagggaacaatggcgaaatacctcctgcttcgaacaattcttatattgagcgtccttgctgggcgctactatcgtgcggagcagcgtgcacagtgcctctctatcgataaccaaatccgtcaatcgcatttcctccaagcctaagatgtagggatgagctcacgaagatgattccgatccgagcggagtataatggacatgcaggccaggcgaaactcggctactgaatggcacgacagcatcgaaagacctctcggaggcccagcgaaggtggagctcatgggattgctcgaggacagcacgcaactaaacacatagtaaccaggtcagcattgtgtaattcttaacagatcttcaatcgacaatgccttctcacctcctctgggagctcgtccagtccgaccgtaatgcgatcctcccgcgcagcgtctatgtcacggacggagagggatgacgtggttaacacagcttgctccgggtcgaaggaggcattgacgctctggatgaaggtgattcttcgtttcatggtttcgatcaagggatatcgagtggacagtaaacagaagtgacgaagtccaagattgatctctccaaggtgtcactggtttctccgcattcgctcaattgggttagactacacatatggacattacgttattcggtcacgacttcaccaggtaaaacttccaaggttgtatgcatatattgtacatgaagatggcttgtcaaataaaagataaaagtgcttattaaaaaattctcatacaaaactttgttcgtgtcattgtcattaaatacgccctctttcgccccaaacgccaggtatatgcaattagaccggatccttctaaggcagcacatcccggaggatatctttttgggagctagtcaagctagtggggaaagtgacgttggcgcggatgattaggtcgccgcgggtgctggggttcttggagatcaccatgcctagaccggggtagcgctcttcatggcccggctgggttggaccaggcttagacacgcgaattgattttccgtcgatggtgcggacaatgcgttcccagcctgtcagtgcttcctttaggctgagatcgaccgtggtaataagattgtcaccagaacgcttgaaagtaggatgatcgatctgtaaacggttgttagcaatggttcaagtgtcttcatagtaaggagcggtctcatacctctttaacaatgagatgaacatcctgtcgtcctccttcttcctgatctccaatatttctatacttgatctttgagccagcacgcagcccaggcttgatattggcttccaaagtcacctccttagtagtgagcctgccctgtttgtcaaaggccttgctcttcgtcttcaccttcttagaggtacccttgtagatttcctccaaagtaagaggcaagtctttctcgatgacagtcggttcaggggtaggtgcgcgcggcttcgagaatcccggacgactgctacggaagccgccgcctccaccgccgccgcccagtcctcctgcgagcatggagataatatcttcttcatccatgccgcccatgccgcccataccacccatgccgccgctatccttggcaaagctgcggaaggtatcgttggcatcgctgaaactgaagccgccgccaccgccagggccggtcgagaagtggaacttgcggcctcctccaccgcctggcatgcctccgggcattccgccgaagttgaatccaccgggcatgccgccttcaaagccagatgggccgcctccgcctgaccctggtgggggaggtgcagggccgccgcgcatcagatactcgaggccgaactggtcgtagacctttcgtttttcgggatcagataggacttcgtatgcttgagagacctctgtaatcagactgttagtcatgcgtaacaaaccgaaactgtgcgggataacgtacctttgaatttatcagcagacgaagggttatccttgttcttatccgggtggtgcttcaatgctgccttccggtatgcttttttaatctcgtcttgtgtggcatcaggcttgatgctcaacacgtcatagagtttgctctcggcaaccatattgcggggtaaggatgtgttttatgttaaaatgtaaacagcaggtcaaaaatgatgagcctcgaatcggaggtggacacttatgaaccaacgatgagggaaaagattcctgcgtggggggtgagggatggtacggtgtgcctctcgaatgatgtagaaggttcgaagcggaaagacggatcgtatgtaagaggaattgaggatttaaggagtgcggaaaggcacgggttggagatcatgagactggagaagaaatgaagctcgagaaaatcctgcaaggaactggaaaagtacttgaatgtcagtgaccaaggtggtctccaggtgggtgacgtcagcggtgaagtcttgacgtgtgtgacttgggcccatcgaagtttcgagaagcttcgatcgaacagcaactcggccaattcgacgagaaatgctcaggggaagggtttaaatactatttagaggttctgtagggtaatattgcttttttcaatctgtttcaggagttgcaggggactttttggctgcttgttgactgcgatctacaattctaccgtttgtggagtataacaacgaggatacaggtcccaccgaccagacattcggaggtacctatcttgatatatccattcatatctcgtattgatcatttatctccttactttcacaatgctttccgtggtgaaaacaaaaaaaatgaaatgaaagtgaagacgaaagaaaaggtgcgaatgggtttatagtggccggaatcaggaaaaaagggcttatcggtactccccgatataaacaattgggtatcaactccgaactcccgtcaaaccacctcaaatccccatctcgggtaaaggccatgggacatcggtcattaaaaactgatctaggtcaaagttctgcagactaggcatatcaatcatcaaatcacccagccacgagaactccgcatctgataccagcacgtctggcgcaacctgctgctgcctttcactctggttggctaacgcggtcggtgcaatctgcctatctttctgatcaaccgctggagccgccgccgcagcattgacccgcaacacctcagcaagagcacgtgtatcatcctcctttcgccgctgatgcaacgcaatcagtaggtatgccgtggaatacgcctcacgcatagaaggtgtatcataggcagcgaggacttcgcgcagagtccgcatcgcatcggcgagcagcgccaacgcagcccgattgtcaatcgctagaagtgagcagacaacttgaaagggaacattggcaacttggtgccaggggcagctggaggcgaccattcctcgtgcggcacggagcccgcggcctgccagtgcaagaacgcggtcaatgagattagaggataatgggccgtgtggatttagggcgcggagacggcgataaatgcatagcattaggttgcattggactaatattagcgagggttcggaatagaggagatccaggacggaggcgagggctgtttcgagttctgggagatcttgtggtgacggccctgttggatcgaggttttcggacagtgggaggaggtggaagagctctgcgcgtggggctcggggtggtgcttgctggggtggattgcgggattggggtgtgattgtaggagagggagctgcggcaccgtgaaggacaacgcgggagcgaccaaggtcgaaggaaatccatgtgttgagatgacgagccatgccaaagagtctttgcctggttacggggtcgctggttccctgttttatatcgccatcttgtgtctcgggcggtgatgtatgaagcaggcctgctgcttctggatctgaagttccaagatgtagtcctgcagcctcgatgagatgcatcagtgtacaactggccatccatgcagcatgtggtgaggctgtcatgcgtaaatacgcagcacgcaacacccagcctgtcactatgtcgaccgagggtgtttctgctgcgaggatagtcttatccagtagagtgcgcgcggtctcaatgagtcgaagttccactgctatgatctcgcgccgcgaaaacagatacccaaaggcagccacgccgcatagtacggcatcataggggtgttccgcagaatcattaggagatgacaaaagttcccagcgctgtacgattcgagtaaagaaaattttgcggtccagaaatgtatagcatggatcgatcttctcgaagtagattgctgctagccgccgcatctcttcctgtgtgataagtttggtgatagtcgtcggcaccgtgacaggcatcgagggaagggccgaggatagtgttggcgatatccgtctctcgccgatgttccaggcaaacaattgcaatcgtggtgcatgagccgggtcaattctgagcccaagtttgcgaacaaacgcggcgccagaattggcctgtagggaatgagttacgccctctgaactgcttgtacagcggggagaagcctgcactgtagcggcctgttccatattggccgaggcgccgacggtatttgggactgcatcggaccagccatctgtaggccgttcactgagtgacaggctcgctcggtacagactatgcggtatggcgcgtttcttgcgcgcactgtattggcattccgcatcggtttgggcgcaagtgctacagggctgaccgcctgaacatttgcgctttcgtgactgacacaaagtgcaggctaaacgcgaacgctttcgaggcgttgactcggacatctttgaaaaaatacggggaacattgcggggggttgaaagggtagcatggtgccaagcaaattaaacatcttcccctttttcatttttgaactacacgaaacttaactacatcgatgtacgaggtacacttggtttttttcatctctttgccattcacatttcggcttaatcctcatattctcttccatccggatatctcatcatcccctcaagttcctttagatctggcattcccgatggccctggcatatacaagaggttttcccggagggtcgtgccattccaccatatttcgttcttgtgcagcgcttccatgatcttcggcgcgtcgatgtacgtgcggatctcgaccatctgaccacgataccaacgtgtgaaccaaacattgatgatatcgaacttgtcacctgtagtgggtcagcaactcagcaatgctgaaggcaggaagatttccttactcaccagaattcatcacccctttgaactgaatctccgccactgaccatgcagcgttacacccgccatagattccctgggggtggatttcaaacagatccgcatggtcaaaaaacaacatgctgactcgacgcagagcattgacgtagaagtgcattaggtccttgtagtgtccggcgattgggtgatgtccgacgacggtgaagctgacatttttgtggatcagcgtgaatagcttgctcatatctttctcgagatgtttgaacgagtcccaaatgtgcggttgagacgcatatttgcaatctgtggatgggttctcaaatttgaacccttctcggtcatggggtattgggtcgtccacaactccagtgccattgcatttgccatctgggtcaacaagtccagtgccatcatcacatcccgatggcagaagtgggctctggctgttgtctccggggattgagagaatggagcgtccaaaagtcgccgagggcaggagcaatgccaatagggcataggatagatattgagttaaaatcattgttcaatttttgcaatgagaacaccagaggctagctgtcttgatcattttccctcgtatacagcctggttcttatatctggtgctgcctgcatttcattaatgcgccgtatgcccgtggccgccagcgttgctttctacattgttaccctaagtgtaaaaagactctctgtgtgacacaaccaaacctaccgaaattttgtaattgaacggcgagtttcctatacagaagaccgggaattgagcgtatccgagtggcgaatggcgcgggcaaggtgcagggctactgcagtgtgccattggttgtggcaatagtgtggtgtacagacaaaatccaggccgttaaaccgcctcgatgggtgatatttcctatctttggctccttcgaatttatgtaaatgtgatgatcccattgaaaggctaaatagttctctgtgcctgatagataccattgtccaggccgaacccggcgattggatgagtcagatctaagccgataacagaatttgacgccctccgattggccgacaccggcaaagtcggtgagagcacgtgcccacggagtcggggtgaaaaacctcttgtttccttcttttccgtcttctttctcattatttctctactccagattttcaacgcaaaagatctccatgttgcgctaaatagcaaccccctcatctctctctaccatactctgactaccacctgctagtcgcgcttatgtgtttggcaccctcgatcttcacctcccaggactatatctcggaccacctctggaaagccaacatcaactgaacagtacaaagcttcctactgaattacaattgttacttataaaataaaaatgatctccaacctcttcaaggcaatgcctgcccgggcttctgccttcgcctccatgagccgaacctctggtcaggcccgcttcatggctactgtgcgccgtgccgctatggagcctgctaccttcactatccgtgatggtcccatgttctccggcaagtctttcggtgcccgctccaacatctctggcgaagccgtcttcactacatcccttgttggataccccgagtccttgaccgatccctcataccgtggtcagatcctagttttcacccagcctctgattggcaactacggagttccctccgccgagaaggatcccaatggacttttgaaatacttcgagtctcccaatctccaggcagctggtgttgttgttgccgatgtcgccgagcaatacagtcactggactgctgtccagagtctgggcgagtggtgtgcccgtgaaggtgttcctgccatctccggtgtcgatactcgtgccattgtcacctacctgcgtgagcaaggctcttctctggcccgtatcaccgtcggcgaagaatacgacgccaacgaggatgaggctttcactgaccctgagcaaatccacttggtgcgccaggtcagcaccaagcagcctttccatgttgccgctgctgatccccactcccacgttgctgtcatcgactgtggtgttaaggagaacattctccgcagcttggtcggtcgtggctccagcgtcactgtcctgcccttcgactaccccatccacaaggtcgcccaccacttcgatggtgtcttcatctccaacggccctggtgacccaacccactgccaggacaccgtctaccacctgaagcgtctgatggagacctcccaggtccccattttcggtatctgcctgggccaccagctcctcgctctggccgccggtgccagcaccatcaagttgaagtacggaaaccgggctcacaacattcccgctcttgaccttagcactggtcgctgccacatcaccagccagaaccacggttacgccgttgatgcttcgactctaccatcggactggaagccgtacttcatcaacctgaacgaccagagcaacgaaggcatgatccacaagtctcgtcccatcttcagcacccagttccaccccgaggccaagggcggtcctcttgactcatcctacctcttcgatatctacctggactccgtgctgaagtacaagaacagccagactggtctctaccctcagcgtgacagccgccccagccctctgctggtcgacctgcttgccaaggagcgcgtgggtgttcagcccaccattggccagcagaacgtggtagccgctgccgctgcttctgctgccattgccgctgctgcttaagcatgtcaacgtattgcagtaggagttctggtttttgagggttcaattggttgccttgatgaaataattttacttttcgtattttttgttcatagattcatgcatggcatatgaaatcaacagcattaagaccatattttcatgtccaagctctttgtagtcgtatcaatattttcatcatcgctttcgatctctaagttctacttagccactatagataccacatcctcatcagcaaccaaatgtcccaatcctacccgctgcggaacatgtctcgcgctcgctccccacaccaatgcatacttaaatgtgtccttaattgtgcgatggatctggtcacaaacatcctcaatggtggagtcctttcgtacgatgagcgcctcatcgaatttaggttcctctccctttctaaagatacgataatcatcagccatgtcaatgaacctaaagtcaaggatataccataccgttttgtgtaaagccgcattagtctcagttccttccagatgcgttcgacaacgtcttgcacgccgaggtcaagttcgcaactcatgacggctgtgtgaggttcgcgggcaagggcatcaaggaactcgaggccgatgctgtcgaccttgttgtaaacgtaaagactggcacaaaaggagaaatattagcgtttgacagttggatatcaatcatgattagtgtcaatcttaccagcggatgtacttccggtggtccttcataatcacatcgataaagtcgtcgatcgtggctataacggagccgcaattagtgtttgggcctggctgtttgtattaaagcatcacgtaccattctcatctcgcacgagcacctcgcagttgagaattttgtaatcccggagcacgttgtaaaccaacttttcatccaaatgctttgggggcgtagcaaaagagatcttcatgccaccggccttcttgattttcaagtagatattactaggatggtatcagtatttcagtctgcgcaaaacttcggatacggtataacatacgggggctccttgttcaaccgaatgcccacggcatccagctcggcctcgagcaaggctcgctgttcggcacgctttgtggcgtccaaaatcatcaagatcaaatcacttgtctagaagcaggaattttgtcagtgtttctgtactctctcctattaagaaagttagcccgctcacctttgcggccgaaatgacctgccgaccacggcctttgccctcggaggcaccttcgataatacctggcaaatccaagatctgaatctcagcgccaccatactccagcactccgggaatagccgtcagcgtggtgaaagagtaggatgcagcctcactcttggtcttggtgattttagacaggaatgtagactttccgacagaggggaagccaacaagagccactcgtgcatcgccgctcttgctgacatcaaatcccgcaccggggccaccgccagcacctcccactggctccaagagctgggctcttagccgggcaagttttctggaaagattgttagtttatatttgaaattgaagttagagaattcagactataccctttcagtagacccaaatggtgttctgatatggagatttggaaattaggtcatatcctcccctgatcaaaatgatatcttacctgttgccttgttctctgtgggtcattagcggggtgatatataagtctgaagataagaacacttactctgcgttcgacgcatctcatcctcgatcctgtaaaagatcagtaaattaggccatccagcaattaacaagaaactgactccttgatcttttccgtgatgttcaccatcttgtcggttgaggctcgtcgcctgtgaaatcactaaatatttttctctggtgcttcgttgtgcctcagagagggaaataccaaatccgatgtgccctggcgcacttgccaagccttatgtaagcacctcagttggaacggtccaagacgtcgaccttttttttgaagctcaagcttaaccttccaagtcaacatctccaacacaaacacgaccatggcagatacatcggttgctgagccaccagctcccatttccaccacccccgaaacccttgaagtcaatgccgaacagacaattgtggcaacaaccggcgcggacgagactgtgcaaggagagcagcagcttcagtcggtcaagaagaccaagattattcgcaggaagaaacgcccagcgaggatacaagtcgacgcgtcaaccatcaaagctgagcctgcacagcagccgggactcgactataatatttggtacaacaagagcggcgacaacgacgacaaatatggcctcagccagcctgcgcctagtcgctgcaatattgcgcgtgactcgggatacactcgcgctgatcgcattccgggctcctttttctggtaggaaattttaccattgcgcatcgcggtagacatttgctaatcctttttccgtcctatctagcatacattttgcgcgaggcgtctgcgtgaaaggtcaggactgtgaatacctccatcgtctaccgacgattcacgatatgttagtgattcccatgccgtacgcgattcgaggattcttctactctgttggactcgtcggatacaaaagaacctggctaatcaatgattcttaggttcaatccaaacatggactgctttggttagtctccttgctatttgattttaaaacaggcgactgactccagactatagggagagacaagcacagcgattacaaggaagtgagtatctctttgtgactaggagatgttgcttcgctatgaacatatcgctaacgctacttgaaataggatatgtccggagtaggctcgttcacacgccaaaataggacaatctacgtgggtcggattacggtttcgtgagtacctcgaaaggctatacttcgtattgttgctaatcaacatctagcgatgatatcgaggaagtgtgctcaaggcattttgcggaatggggtcaaattgaaagaaccagagtacttaccggacggggcgtggctttcgtgacctattcgtcagaaagtaatgcgcagtttgcgtaagataccccttcccaagctctctatttgtaccgaactaacatatgactaaagtctagctgcgatgcaaaaccaaagcttggatcatgaagtgagttcaacatttcaatccacaagatgtgttatacaaaggtactaacaacaagtaggaaattcttaacgtacgatgggcaacggtcgacccgaacccaatggcacagaagcgcgaggcacgccggttagaagagcaagccgccgaggctgtgcgccgggcactacccgcagcttttgtagcagagatcgaaggccgagatcccgaagccaagaggcggaagaagatcgagggaacttttggactacagggctatgacgttccagatgatgtgtggcatgctagaacccgtcaattggaggatgcgagccgggccgctcagctagaggcaccccaacaaccgatgatgatcgagtctgcttcggtttcggtacaggagcaggagcagcagcctcagagtaatggcatcttctccagctcagctctcgcagccctacggggtcttaatggcggaacggtgacgacccaggcacccaaggctgttggtggaccgttagtcggctacggcagcgacgatgagagtgactgatttacgtgcagtttgtgcggcatcctaatccatcatgattgtgaattttttcatgtacaacagcaacgatacctctgtcaaaatgtttatttctctctgcgtctccatacaggatatccgtaaaatattatttctgggcgtcattcatcatcactatgtatggtatcatcccgagcactcgctaaaacacaacattgagagcgtgtcaaccaaaacgaaatatatccacccataaaccaaatgcaaacaccacgagtctcatcgatccgagacttatgcttaacctaactccccttcactcttcctcccatgagatcaatcagtcgtaaattcatttctcgctagggtcccaggtcatagtatacgcaggagcctgtgcggtagttgtagatgaaagcattcgtgtagctttctatggtatcatttgtgcgactctccatggccaagtcagtgagtagctcatgcacttgactaagatacttccgctctgtcagcggtgcgttctggatcacgctgcgccagctctctgcgtcagagagacgcgtgtcgcgaatagcgtcgagaacttcgtcgcgggtgtcgatggctgcgacagggccgttgcgggcgttttcggctacttctcgagaggaaagaagggctagaacacagtgtatcaattagtatactggactggatccccacttgaagcctgaacatacctgactcaacaatgttccttcggttcgtcttcttgtttcggtgctgggggatgaggatgcgcacatcattggcccgttcctggaacgcgagagcctcctgctggctcaattgacgggactggcggggatcaggagttccctcgcgatactggcgcgcctgcacttctgatcgaagccactgcacaagttcagggaggcggatatcgaattcttccttgcgcatcagattccgaactttaaacccacgctccttgctatcttgcttggcgattacaatgcaccggtgattggagtctttgtattttgctagaagctcttcaagggacgaggcatcgactgcaagctccgcgcttatgttgttggaccagagttcttcgatcagtttaactcctgttgtacggaggactgcggggtcaaagctggcaacaagtacattacactttgaagatcagcaaatattacatcaaacgagttcggatggaagtcacttacccgacgggctgtccagtacaactcagcacttgtctctgaatctttcgacggagccttggcctttaggtaatcaatcatcgatgaccgtagtagatcggagccgaggttgaaaccaacagcatgtgcttgaggtcgatttgataagccatgaggtgagaattcctgaatcaaccggtcatatctgccacctgcagcaaacacgccgcgtcttttgctatcaaagatacactggaacagaatgctaccgcggtagaacttgtcatgaacgctgctgagtgggttgatataaatcttccgtttcacgccgaaactctgcaaataggtcatgagcacgttcaaacgagcgaatattggtgaaatccgctccgcatattcagttccttccatgataatctgaagtctgcgttttgtctccttcaatgagtctgtatcatatccattagcgtattgttcccaatatgagaaagtaagcttaagtacctctgaaatcgaaacgggcaaggtcatccaacgaagttgaagcaacaccaattgccggggcccgaagttcacttcgaatcttttgcatgttatattttccaacattcagcttactgagaacctcctttgccttggggatttgagtaggcgtgacgcgacaaaattccataataagctggagtagatcggagtggttgacgaggaagcacatcggagtagaccgcagaggtgggaattcctcaatgatttcgtccaaaactttgatcacttctgcctcttttaaggctagatccagggtgttgtgggacacaatatcaaagtcaacttcgcggtgagtttgtggttcgccaccatgtattgtatccctgtagactgtgccgaacgcaaatgtcttctctagtgagtgatcttgtcttggaattgctcgtgcgtttggaagtgtgagatcatatggcagctgtaaaagactgccagatgcatccagcacacgtactgcaccgttgttgtaatgctgagatcgaggaaagagcatttgccttgttgactcgacagcaccatgtcttcgaaatatcgaggttagcttcttcttaaccaagccctggacaagtagctcgttcgcggccggtactgcatgtgagtctatgtcccaagcaatatcttcgaatttcttaggcgactgagaaaagatagctgatagaatctttttgtagtcgggtgaatttggatccgagagcagatgcacaatagcccgtctgaatgtctcttcttcgacctgaagaggtatctttccgctggacaaaaggtcggaggctgtggggcgttcactcggatcatggctcagcagagattcgatgatctggccctggagcaacttatcagattgctggaaagcgggcggaagagtgtgattcttttcacgaatttgtcgaagagtttggtctcgttccatgccagttggcaatgaataacacatctcgaagaagattacaccgagcgaaaacatctagaatgcgtgagcaggtagtcgtgatgccagttgtatattcactactcacatcgactttctcattgtagtgccccgaaacaactgacttcatctccggtgccacatagtaggttgtacccaaactacgagtgaaatctccttcgaagtcggcggctgcggacgaacgcacagccgttgtgaattggccacttgttgcaagaccaaagtcaccaatgcggggattgtttgcaacgtcgatgaaaatgttgtcaggcttcaagtcacggtgtatgatgccgtgactatggatatggctcaagccatcgagaatttgccggaagagacgccatgaacgctcgatatcatcgcacaaatcatcctttattagatcgcgcaaggtctagggaatgttagtctagaacaacgagcagagcgatgttaaaacacttacatgtttctcacagtactccatctggatgtagagtgtcgttacgataggcctggcataagagccagatctcgctcggctgagctcaacttcctccacacttccggcatcaaagtcgctatcattttcatttaccctgttcctctctggcgtctctggataagcggggtcagataatgttccttcgttttcatcatcgctgtctgatgcggcaaattctatttttggatatccgctggagctgatgaaatcgaggccgcctgtactgaatccatggtcatggctagcaaacggatcaccttcggtggaggacatagcctcttcctccacgttattgaagtcctcttcaagccaagcagcgtagtatcggacaacatagggatgattcagccgagatagcagcatggtttcggaaagggtgtctttcaacgctgcagccgatgtttgagagatcttctttatcgcatataaccgaccatcgagcttgttccgggctttgactacctgcccaaacccaccacggcctagctggcctgtctcgtcgaagtcttgatgatatcgtgagaaagccggcacgggtccaaaagagtctaaccgtggctgtctctgcatggacacagatcccgatgccctttctcgcatctttaacggcgcatccacgcggaaaaactccgacggttggagctggaaagcagtcggacgctttttgggatttgggcgaaagaattcacaaagcaaatcttgcaggggcggcgagagccccatagacaccatcaactgattggcggaggtgtacctgagaaggacatcctttccaaagcccatctgaagcagcacaattccaagatcccagacatcagtcttcatggagggagcagaaccttcttgtgtcagctctgggggtagccaaagtggtgatttcgacgccgcgaaagaggtttttctgctaagagagtcgggcaaggcttcttcgacgttggactgcagtttaacgatagtttcaccagaaggagtcctgaacaagaagactcggccacaatgaatgttgccatgcacaaagccgctgcggtggtagaactccagagcctcgagtaactgaatcatccagccgcggagcatgtcagcagctacggtgcccacaatatccaggagctcggaaagggaacccttgttggcatactcgaaaagcgcaaagacggtccaagaattatcagatgaatccaagtggtctattgggcggttgattttaaagcccacaaattcaacaagattgggatgtcgcaatcgcttgattccctctaacttgtcctcactagtgcgcatctgctcacggaatgtcaatccttcggaattattctcaacgaggcaaagctccttcaacacaagcagcgggacgtagcatcggctctcagacacaacaggcctgacggtgaaagtctttctgcattgttcgctttgcagaagggtcttgccatagacggcgcggaagaccagcggctgctcatcggtgtcgttgacgaccaacggaggatcaaagcagatggcgccaggtgtattttccactaggtcatcaacataactcatatccacgccgccagatcgactctttcgtctcataagacgagccttgttccgctgtcgcatcttgtcttgaagcatttcctgcaatgcgcgctcttcctcgacagctgcagccttctgtttgcgaagtttctcttgtttttctaggtctgcgcgctgaagagcagccgcctcttgttccatgcgctcctcttcaaggctgggtaggtctttgtcctgtgcctgtgcctgggcaacatcctctagaacatcttggatggacaccgcaagctcgtaaatcatttcactgccgagcagagattttggcttgttgcgtagaatttcttgtatccgggagcgcgctccatcgcgaaagccgtcgaggtttcctggtgagaggttggggattgttttaggatacgtagtggggagttcgaccagcaaaatgaggagtacgtctggattcgaagaggagcgcaaatgaagcttgaatgtcacatcggaggattgctagagtgtatgggttagtgaccacgaggggcccaaacagctcaaagagacacccacctgccaggccgaccgcctattttctacttcttcaaagtcgtcgccatagattgagcgcagagcttccacctctgtctggtggatttctcggtaattggttgtaaatacgggggacgtcacggaggaatcagacgtttggtttttctggcgggagggcttcttcctctgtttgggagacatcgcggggcgtggcgagagctcgccctacaagcgaccctgagcgtcgtgcgacatgagggctagtaataaaagatgaaagggttatgggaggttgaaagaaatcgggcagtcttttttccctcgcctcttgaggctagaccaaacaggcggtcagataatacgcccttccacttctggggtggagatgcttagtataaatgacgacccagttggtttaactgtggatttatgggtttaccgcttgtattctactgtggtttaatttcgtctcatgcttcttgcgtcttgtgtttatttcaagtcgtttacgagatagcccatgtgtctatcgacttgtctatcatcgccgtcaagccaaatcaccagtccctgcccaatagtgggcccagatatcttgagataatgagctggtgagccggtgagctggcatactgagaagggtggcaattatcgaccctgcagtcgatcatctctactagtgttgtctttgttcctgtgactatccacaatcgaagacatcgagcaacaagctgctagccacagcaatcattggtgcgtatccgcaatgattccactatccttggccctaggtccaacacacagacccatctgcaaatgcgacgctgctagcggcaatcaggatccagcccaggttgagggcgccgaaatacgaagccacatatatggcagccccatgaagatgtctcggactccatagattgacattagactgtcgggcctctgcttgtccaccactctgtacagagttaggtggccggaactggaagaaagtgagagcatgttctggacgtaggatggcgttgacaccgaatccgacaaatgtggttgcaattgcgcgggcaatcaagcggagaacaaccaaacgggaaagaaagatattgtcatgccaagccagtcttatgtctgacgtttgcgtagtgtctgcagtggcttgcagctttcaaggacttgagcgccgtaagggatcacagtgtagtcttcgaagtcatgggaaagacaagaattcgggggatttcttatataagacctgaagatagcatagatatttgtaagatgctctgagaacaatcagaccccgaagaggaagaattgatctaagcaaggctggtacatagttgtagactccagatatgccaagtaccccaggagggtacatatggatgtccactcctctgtacacgcacatgtgtactctgtacacacctgttatgaacaactcaaggcccacaagcgaattcttctcggaataaatgtggaacaaaagaaggtgaagaacttctcccaaatcccaatcctcaaaagtccaaaaccgagtgccaagcgtaaacaaaaggaacacgagcttatcgataagctttttccgaccgcgccgaccataaacatccattagactttcgattgggcttgaacttcgaggtttcttccaatcccggcagtcaaaatgctggactggatcaaggggaacgatcaaagcacacaggctacaggtgtggtgattacgttgacctttgaagccattgctctaacgtgatgctacagatgactctaagctgctagaaccccctgagactccaggccatgtctttgccattcgtgcgttcaagagtgctctgtttggcacccccggagcagaggacgatggaaaaaacgcgtccccgagacagtccggtcaccaacgaagcaaaagcgatacgacaacatccgcgccaactgagatcaagaccgacgcgaaatcaggcgacgcgacttacaaccccacgggatccccgacgaaaagcatacttgttacacccggaaccgcgttgcgtcgtaagacggtatcctttggcgaaagtgtcatcgacaatgaggggaaacgccccggctcggccagtaagccggccaagactccaccaaatccttccggagccctcagtacccagtggatgtctgggtcatcagatggaaacggcaagccgaggagcaaactcacccagacactcatgaatgcacgcgacaacgcatccaagaactccgatccggccaagtctgatgagaacacacgggaaacgaaacatgccgtgggctctggctccaaggatacgctcgatgaagatgtcactatcaatctggatgacccccactcagagtcaggcaagtactggaaaaccgaattcgataattatcgtgtgaaaaccaatcgagagattaagaaattgattcattaccgatcgattgccaaatcctacgctcgcaaaaaggatacagaagctatgcggctggccgacaagctcaaggaggaagaagaaaaggtcgccgagatggaaaggcaggtgtcacggcttgcttcttcgatggtcggggagggatcgacaggcgacaaggagcaactagttcaagatttgaccaaacaaaccgctcttgcattgcaatataagcagcaggttacctcgttgcgcagtgccttggaacgacatgatgttgtaagcgatgcggcaaatatcacacaaaagaaaaaggaagaacctccttcaaacaccccaactgaggagcttcgcaaaacacaacaagaattggaacaagccaatgccaagattgaggagatgaaaaaacaacagtccgaactaagcaaacttcaagacctcgcgcagagctcagaaaagaaagcccaagcactcgagaaagagaatgacactctgaaacaaacactggcgcgagtgaagcaggaaatgtctcgatatgaaggtcgacgaaaggacaaggaaacaagactgaagcagagagaagccagactggagcagcggatccaagaatatagagagaagctcaaaacagtctctcaggagcaccgtgcctcggaagagaatttgaggaatacttccgaagcagaacgccgtcacatgcagaaacagatcgaccttctgaagctgcgactcggttctaccgaacgcttcccggcactaccttccacagagcggcaattcctaagtcctcgcaaagacaacacagacgtgcaggcgtttgactttgactttggcgaccaggacattactgatcaggaccttgagaaacctgaagaagaacccaccgaagataccgagcctcccccaagcccgagtccacgctccaaaatacgcgaatcgcgacctgctctgcgcagtaacacactgggcacacttagtacaagaccgaatacccgagacatagtcgcagatgacgacgaggtgacacattatctgaacgaaatactcctgaagccgcaactcgaggcccgtactgcagcgttggatcaaatccccccgtcctcgcctcccgatatctcagccctgaagtcgttgaaccgcacgtactcaagacgccgactcggcgaaggccagcggctctatcggaatccgaacctgaacctgaacccccctgctgacgatgatactcggctcagcaaccgacacacacaacgcgaacgtacccacatcaaatcgaccctcgattcaatctctggtctcccgtctcgcagtcggtattcggggtatgccgtttcagcgggcgagcgcgtgggcaagcggtacgggtttactgatgtccagcgtgaagcgctcactcctgaacgaattgccgcggccaagtcacggctcaggcagaaggacagtcgtaagatcaaagcatttggaaaggagaatctttgaggtgactatgtactatggagtcgcctgatttggaaataaggcatagcttagcattatggggtggtgttcgggttcataagcgttactgtttttcgtcaccttgtttctatctacgttttcagcgaagacaattgttgtattattgaatcggtggctcttctagtctctcgatcgggatcgctcgcaggcactgttgccaaattctcgctgcctccgggattggtacaatggctaatgtatcatatcacacctttattcaaaatctagattaggtattatcttgtctacatccagctgtgctctttcactatctagttcacctacaaaggttccatatcgtatattcacccagtgtgcaacggaaagaacacggtcggtcgtgtagtgcgctctcaggccttaccgtcagagagcgacacgacggcccatttcccgccccaggcccacttacgagactcagcgccgccgcctcccggcagtgcgcggagcttctcgtcctcgccagcggggagaccgacaacgggatcagccttgcaagtgcggaaggctagaacacggatccccgacttagggccaagcgggccgatagcttctgtgaaaggagtggtgggatcccattgggcctggatattgttagcaagaaacacaaagcgaaagaaagaaagcaaagaacactggacttacatcattgaccaactttcggtagttcaggtcgcccttgaacaagacaagctcgctttccttcagatcttcgaacagctccggtgccacgaatggcatgcgccagtaaccaccctgggtggtccagaaagcgtgcggacgcaggatcagcttaccatcctggtggaactggctccactgctcgaagaggaatcgcacgtcggagacctccttgtcagaaagaggggggaatgtcttgcccgagccatcgatcgctgtgtaaaaggcctgcgggtcgaccatgcagttgagcagatcggagaaatccttcggggtgacgtctgacacaaaccatggcaggcgcttggggtggagcacgacactggtcgccagtccggcggacagcaagtatccagcgagaatgagatcaacgaataactcaaatccggagttatctaagacgatgtcaacgcggcggtcgccgtccttcttctctctccgcgccttttgcattaccccgaaagcagcatcaaggtcattgacaatgatgttctgctctgatgctttgcgcgcctcagacccctgcagtttctggatatcctcgtaggtgagagatgtcagaagtgacagatcggtggcattgccccataagcagatctcgcacatctccgagaagagcagcttctcggccgagtcgatttcctctggcgacttgttctctcttgcttttccagactcggattctgtcgccaactcacggtatctcgcagcgagttctagtacggcgggccgggacgacttgaatgtatccatcttctggcgggcgaacacgtcatagcccttccaatgcttagacaacgcgaaaagggcctccatgcggcggtctatgatggtcgttggtcagtattgccgaaatatatctattctctgttggaccggggttgggcttacagaggtaacactctgcataaagccaggccacatcgtgccagtgggggtttccacgctcctccagctccttgttatacgaagcgatatctggatgtccgtcgtcatccaggggactagccgcaatagacacgttaggtgaagctcttatatttctagcattgaggataaaatgactcacgtgagttgtcggtcgtgctgaagctcatacttcaaggaggccaatttggcgataatgcccttgccttcatttgccttctcgccgtccttgacagctacaacggtgcgatgaaggtcatcgatagcgccagtctagagtcgtcacacatattcagcaattgatccggttatcgattgtctgccaagctcacgatgatgacaggccaccgctcgttggccgagaccgaggcaaagctcgacttgtcggaggtgaggtactgagctgctcgggttagtctaatatatttatggccgaccaaggatacttacgagtcttaggatcgaattccatgactgctatgcaagatgtatctagaccgagggcaaaaagtcaaagtggcagaatcgaggggagggcgcggggtaaaagcggtgtacaatatacagttggcgacgtcagagctactcggagctactggaatacatcattgcgcataaatacattgggaacatcaattctaggtagatctcgtaggcaacgccgcgcttgaaaatcagatatgccatcacattcccgaaagaatagagttattcgcgtacgcctaagacagttagctggggaacttgattagatgtttaggtcatggtcttaccatcggcttgatatcggggtgtggcgatgccccaaagacttcatatgcaagtttgagttcagggccgatgttgatgtaagcgcccttattttcagtcgcgtcgcagtatctgggagcggagaagacggtgatgcaacgaccatcgtgttcaacgtcgtaaccgcccatccgcacctcgtgggagcgaatgatagcctccaggccattgttttcacagaagcgcttggtcacatcagggccaaattgaagaccgacgccacgcttgctggggccgcggccaacctcgggctgcgggtcggtccagagcatctccatcatcaggcccgcttggccaggctgtcgttggttatggcggttgagcttgcggatatcatctaacttgatcttgtcgtcggagaagagaccgccgtgcaggacaaggtacttctcgccgatcaaagtggccagcggcagagccgagaatgactcggagaataccttgaagacccgctcgttatatttagccttgcactcgccttcgaagccgtagaccttattcatatcatccgtctcgtggtttccacggttaaggaagagaccgttaggacgcaaccacttgtatgcataaagcagcagagcgacttcgcaggaccaggagccacggtcaacaaagtcaccgttgaagaggtaggcgtgggtatcggagggggcaccatttagtcggaagatattgagcaaatcgaagaattggcctaaacaatcagcaactgcttcactcaccagcaagacaatacataccgtgtgtatcaccgcagactgtcaacttcttgcccgattccaccccaatttcgaccatcgtaggctcgttgtatacgatatccttgacagccttgatgatctggaagacatatttgcgatgaatattctttccgtccttaaagcgctggaccatatcatcgaggaactcctgcgtcatttcctcgccaaggcgcacaccatcataaccgtcctcaacattgatagcatcgatatccaaatccgcaaaagccgaaggcggatctgagatctcaatggcccgctcaaactctctgcggcgcacgagcttctcacactcagcagccttcagcttagcattctggttggccggttcgcgtctcaccacagccttgaaatccttcaaggcctccttgtaacttagaatggcggtattggcgagagcacgtctccagtaggcctgtggtaaatttggatttagcatatatcgccgcgaccgctcaatatgcaggcacaagttgtctctcttgccggctaagaatgccgactaaccttcacatagttgggatccaattcgattgccttggtggcgtcggcgatagcaaaaccgaaggcttcgagcttaatctgagcctataacagcaagaagaaaagacattagctatgccgatcctaacgagtgtgcacgcgactctcgggaatagatcgtcaggaacatacctgggcccggttggagaagaaagaaggatccttgtcgaatttggcaatagcctgggtataaaagtcgacagcgacaggccagtcatgctcagcaaaggccttgttgccctgcaccttaagcgcagtggccaattcttgatcggtagccatttggggcggagataaaaagcgaggggcacgagacaaggattatcggtgcgaaacaagggcgcggaggaaagaaggcaacgattatacgagccggaagagaaagaaagagaagccagaaataaataaaactcctctaaatccagtatagactaagagaaaaacgaaaaaaagacgagagagtggtcaaaaggaaaaaataaaaaagtgagagaagagaggagaggcttgttcctgcttctgcaatgttcttttttccccgatcgcaacgggccttggcatcgatccagacttgacggccacctcccatccatagctttctctctctcctcacaccctcagatctcctccatatgtctttctacgcccctccaaaccagcagcgcacgctgcgcgcatgcatggtctgctctgtcgttcaagtccacaatgtaagagctacacgatctccgttccgcgggcaactctaacgacccccggttcctctagaaattcatgcgtgaaggctgcccgaattgcgagagcaccctccaactccgggggaacaatgatgctatccaagaatgcacgtcgcaggtcttcgagggcctgattgctgtgagggatccggctgcgagctgggttgctcgttggcagcggttggataactacgtgccgggcacatatgcgaccaaggttacggggacagtaagtgcattctttgaattcctaagctctgttattcctcttatcaagcacgggttggctaattgtgtctttcgcgttgacagcttcccgaatacattatcaacagtctagaggactctggtattaaatatgtcccgtacgtgttcgaaatcattccactatctgagataccgtcgtcgtgatactaacggtcgcttgttccagtcgagacggaagcactggcgaagaagatgcatgaagcacctactctcaagtctttaacgctacacgaacccacccttgtccatacagtcttggtttcggataccctagcgcacacccattgattcaatcaagacatgctatatgagggtggtttcgacaattttgctggtcgttcggagtttcggggaagcattaccttctttcttcatatttattggactgcaagggcgtacacagcagattcagattacttaggagtttacaattccagtttctttagctgggggcataagataagaaaacggcttgcagagtatatatccctactctggccaatgattcggttgagtcataactcaatggtggacaagcacaatttccaggaatatacgttgcatttttgtaatgacatgaaagtcgtggcagcaagggaaaaaagtgaaccctgcaggacataaaagaaaacagaaaaaaacgctcattaagccaaattgaaaacgcccggacacttctaaaggtcattgccggcatttgtttagatgttctggacgatctgctcgatcttctcaaggaggatatcggctgtagtaaacatattagtaaagagctcttaagcacaagaaagaaggttaacataccgtggtgcttctggaagaccagcatgggacgcagacggatagcagagggaccacagccaccgacgttgacaccgaaggacttggccttggcagtgaactggtcgcgcttgggggtgtcccaggcgatgaaggtaccgtggtccttaccacggaggttctggaagtgctcggggtacttctgggccagaccggcgagaccggcgtagaggtagtcaccggtggtgcgggtgttctcgacgaggtcgagacgctcgatctcctggatgattccgcggaagatcagggcgcgggctgggtcgcccatccaggtgttgaattggcggtagggcttgttggggcgcagggcggggttgccgtagtagtagccggcggtctgggccttcttggagaaggtgaccatgtccgggggagaggtcaggttccagtggtcgtgggcccagaacttaccggtggcaccgacaccggtctgcacctcgtcgacgatgaagaggacgttggtgcgcttggtgatgtcgcggagaccctggaagaaggcgggcgaggcgtggttgtcaccaccctcggactggatgggctcgaccacgacggcggcgacggggttgtggaactccttgatgagacgctcgacctcggccaagcagcgctgctcctcggcggtgttctcctggacgtgctcctccagagggtacttcagctgggggaagggggcctggggccagtcaaaggcggggatgtcaagcttgtggatgggcttgctgcgggtggtggacagggagccgaagagacggccgtggaaggcagacttgaaggagagaatggacaggtggggagaaccagggctctggttgttcatggtggagagcagctcatcgttggagaagtcggcgccgacgccaccacgctgcatctggcggtagtacatgaaggcggccttgtaggcagtctcgttggcatcggaaccagccatggcggtgaagacctggttcaggcccttgggggcagcacggaggactccggtcttgagaatctcagcccagtcggaggaggggaagttacccagagcagggcggttaatcaaagcgcaggccatctcgggcgaggcggccacctgcttgaggtgggggttgttgtatccaacgggaatagaagcaatctgagcatacctactggggtcagttcctgtattccaattggctcgtggctagtgacttacacatcaaggagcttgtttccatcgagatcggcgatgctagaggcggggttagtcgagtcttgatagtgggttagggtctatcatactagttaccaacggactggtagtagtcggccaacatgttcaagctgcggacatcaaagacctcgtcgagctcggcggcggcggccttgttcttaggtccggggagtgaccccgagacggagggtgcggagggctcattggggaagaaaggcttctctgcacgcagactggcagtggtagagagagcgcgagctgccgggaggcgagctgcagagcgcagccgtgtgctggcacggaagaccgaggacattgtgaatgtgatgtgaagaggggtggtggggaggatagatgaagggtggagagagaatagcggtctagtaagctatccaatggagggaaaaggacccagatcaatcaatctactcgggcaagggcaagggaaggaggacggatgaaatagaatggaacagcaaccggcgcagggtggctttataccagatgcagttggagtatgctatcggtcttatcctggagctcagtagcttgtccccgcgtatgttgcttttttttcggtgatattgaccaatcgggtgcttgatctcgacaacgaaacgccgagcatccgatggggtatctggacgaattgagaaagtctacgctggtgggttcttgtcaaatctatatggtaagagtttccatataaacgtcccgaggggggctattgtgcatgtatttatctcaatggggacgagtcacgcacaacggcgaaagaaagaagtcgaggccgtcatgttgctactgtcgatcatcccagggttccgggcctctgcgataagctaatttgagtcttggcatctttttttagctgcgtgtatgagcatcgatgtatgatgtcttgactatatcatggttggcttcacaatttatagcacgtgtttaataatggattcgttgtttaattggtaacgcattggtcttgtttagaccgggacatccggtggatgtatccagacgatcctagtaaatatgcaatattaagttacacttgcatttatgtaaacgggaaatagaacagatgagccctaataagctgaacatcggcgaccttaggtcctttggctgataacgcactatttcacccaaaccaccaatcaactgggcttgtggtttagtggtataatactcccttagcatgggagtgtccggggttcgattccccgcgagtccagatctttttgttgccttgacaatgaggtcaattaggagtgcaataactagactatgtcgttggtgatatattttttgttttgggtgcgtcatggcttgacgtcacgctgagcatatatatcttttttccgtggttgggttttgtaggtaaattgtaggttgagacctatgtaaggactatatatatctttggcccgaaatggcaagaagacaacgccggaacctcattttaccccaacacctgggatagtctacagagacaattgatgccgttacatagtgaatccctcatacatagtaatatatatacaccacacatgagtacctacaacctagtcaacgaagaaaaccaagagcgcaccacgcgccgatcctgatccacccaatccagcaaagttcgaactagcgcaggactgtgctttcagcgcacggtcaaaccttgggtcgagggtgatcattgcttggaaaacgtgtagatctacaccgagtatctatactactataggaagcaattattgggctggttaagtaatcattagaatcatgatagtatcaaatagatgtagtacaagtaatatcgttatttgtgtgaagtaccccttctagcacaataaaatcatctaggctaaagtgacataaattttgatacaaaaaaagaaaagaaggaaggcgatgtactaaaacagcagttaacgcagctgccgaccatcgaatgtctcgctccgtcctgacgcagaggaggaggcagcactcgtcggagaggcatagaccatgccgctcttcatctcaatgctatccgcaggggtgacggcgcggccggtatcggatgtgatatcataaccgtggcccatcttctcgtggctcgggagtcgggactcaacccagctctccatctcgacggtgcggatgatttcgaatcggtcgctgctgtaactgggttggtggtggccgtcggcgacgagacgggatgctcgggagcgggcggttgagtaccagtgtctgtgggtgcgagaccgctggttgtaggaggtggtgttgtggttggagctgaggaggcgggggaggaaggctgcaatgagggggcggagtgctggggctgaagagcagatctggtgattgttagcgttgagtatgagcatgggtagcgcgactttggtcttaccaatcccaggctgatttctactgccgcggcgatcagcactggccatccaagccaggtcgcgtcgtagccagtcaccatactcttccacacgtatacggttcgcacggagccggctacgttaactatggagccgagggcgaagatggagataacggcgagtcgttggcgagcagggagtttcagactccagatcaacggcattggtaaagccgtgactaggaaatcggtgaagatgttgataacactggcggagaaaacaatcgcgccgtcattcatgcaatggtatgactcggtagggttaagttgccagtatgcgcggataggtctgtatgaaacattagcaacgattctcgatcaccacgacagcagacgacgcacgagcattggaagatactgataatagtgaacagcaaactcgccacgccaacaaagacaatggcgaaaataaacgccaagttatacagcgcaaagtggcccttcccgatgagtcgtcgacagaaccacaacagagagatcttggtgaagcacgacgacatcgagaacatgatttggaaggagagatttagtttctgaatagcttcgagctccagcaatttaatatcccagatatggcggttcatgtcccaatgttccgtggcgatagaagtgacgatggccattgcgatcccgaagaccagaccgatgacaatgagtgcatcatcgatgccggcgctgcatgtgatccataccctggtgtatagacggagggagacgaccagggaggccagggtgagacagacgacgttcacgatgaggacgccgtggccgcgcgtgggcgggtcgatatagtttggggtgggccatgagtccaggatggcagctggagggagcttcataatcgtatcggtgcaaggaagacgaagaataaaagattgggacaacaaactgcagcagaagatagataggtaacgaacgtgtctagacagatgccattgccataacccaagcccgcgatgaatgggaatgtcgatcaaaaagaaagagagtcagagcagaccgagggtacaagtgagccagctccgggtaaattgcgtctgttgaggaaaaataaagaaaaggtataccccaccgggggggacatggacatggggtactagaccgcagatataatacagggctaggccagacctttcgtccaatacagagctatacaccaagcgaccagagagacacacccacgaggcatagagtttaccccaagaacacaccatctcaaaaaggcgtcagtgctgaagcatcagggctatgttgtacatctccgtcgccaaaaagccgttccacgccatgtccaaaatggcaacacggccgaaggttgagtggaatggacaatgatagcagatccaatgtccccatagttccatcgtcggccccactgagcctttggatctggatctgaggcttgtgagaggttgagatggtgaggtggcatcgcgtgtgagagagacccctggctcgcttcacggaagaccacggactcccaaggctgtcgacttcgcttaaataatatattctggctctcacgtcaaatcacagtgcaatagggggaaagttaattgcattggctcgtaacaaagtgttaaaatctgcccctacggaggccgatgcgtggtggtccctgctccggaggggccgatgggttgtatgtaactcgttatatgaggtaggaggttcgttataatttagacaattgaatagatcataaccaaagaatatcaagtagaataagagggtagtatataactagatgtaactttactacttcacaactgtaacgttcagctcatcttatgatgcggggtcactcttccaaggttgtctccactctgacaatgcatctctcacgtaatatatctggcacgtgtaaaacaatgggctgagacaacgcctttgcccgctattttctgcacgctttaccgtctatgatttacaggaaaacaatcaatgactcttacatatcattcctactatatgggtatcattcaaacaaaaagagaaaagacaaaaaaatacaaacaaagacaaaacctcacgatcccatggacgcaagtcgaagtttcaattgattctcgaccaatctctgttcttcaagcgtcaatctgtcctcggggtcgatttcatcgacacaaagtttgatcttgaggatggactcggcgcattcagccttcagtctccccatcatctcgggatcggtcgcgaacgcagtttcatcaatcccgcctttgtggagactctctttccagggaaccagataccgttctaaggccttagagcccatgcgagcaacatgctcatcatcgagaagccggccggcaagctgactcttgaaaatcgtcttgttgtagatcttctcctcaacggtgccaccagccaccattcggtacacaaaaactttcttcttctgaccaatgcggtaggcgcgtccgattgcctgctgttcccaggtagggttgaactggaaatcgaaaatgacaacgcggttcgcggcctggatgttcaagccaacgccaccggatttggtggagatgagaaagacgtaggtcgagggatcgttgttgaagctccgaactacctcgggacgcttcgctggagatatattgccgtggaggagagaataattgatctgtgttctgtccattatttcccccagatacttcagtgttggaatactggaagaaaagactaggatcttgtccccgacagagattgcctgcttgactatctcattgaggatcatcactcggctggataggctcggttctagcaagttaggagcctccttgaacacatcatccagctcagataacattgacctgggaatgatttgctcttcgacaggaatggtagatgcgagattagatgcgaggttaggccccggattaggtgcgagattaggcccgagattattacccgggtcatcaccgctaggacttttctgtttaccggatgcatatttggtcttccgggattccagttccgccttgaaaagggccgggtgattacaacaaagcttgagaagaggcagccaagacataagctccgagcggacgcccgcttcattcctcagtgctacacctttgataaagatgttgtacacagctttttgaatgctggtcggctcgaagtaaacagagaattcgaactttggcggcaggtcatttatcagtgaggacatgtccgctcgctgtaccttggggttgatgatgcgaaggaacagctcctggcgctggagtgcctctcttcggtcaaacttgctactttcaatctgcgagccattttcgatgggcttgatgaattgatcattgaaatcagcaaagtctcccaggtactgaggggcaacccaatcaaccatccaatagtaatcttccaaaccgttggatatcggagtgccagtgagcgcaatccgtttccgagtgcgcaagcgggaggttgcctcggcaagctggctttcatggttgcgtaaattctgagcttcgtcgaccacaacgagagttgggctgttcaacacccagtttctgacatttttgttgaccgatggttgtccctgctcctcgttcatttctgcattgtcctccttcacgagaatgcggaagatgttatagctgagaatcagtataccaccctcctcattccacgcgcgaatctcttcgttccggtcaaggagctggttttttgtcggaatggctcgaaccttgccaagatggtggttctcgggggaccacattgcaaactcatcgcaccaattttggattagcgatgctgggcacagtagcagggttttggattgtcgcaattctctaggaatttggtcacgaatggccgggaattgtgatgccccggcagcggaaattgtgacaagaagggatatactaggcaaaaagggttaactgggtcccaatgaatgggacaatatcgcatcgcaatcatcactcacacttgcatcgtcttgcctaaccccatagtgtgggctagcaaacacccttcttgtcttttgttctcaataacctctcggaacataaactgaattccagagagctggtaggatttgacatattgcgcgatataggggtccaggcatatcatgggaagtcggaacgaaaccggccttggaatattttccttagaagcattcccttgggcaaaccgagacgcaagcactcttttagcctcggcttgtttgtctatccgttcttggccttctttctgggcccgagacaaagtgattttggggttggccaatttccgcttgccgttgcgccgaatggatgggttcatttcgtcgggttggacatgagaggacacgtccatccatcttctgcatctccagagaagatcgttcaaacacccaaagaattgcgcgaatcggtcttcatcgctgtcctctccgaccgccataagcgtagacttgacttcttttactgtaaaggcgccacaggggacttggataacgttgacccacgacacaaacaaggcggccattaacattgcagaatggctctcctcggcatccattccctcgatcaccgatgaattgtcaaacatgtgtttcagtgcatctcgcatatgttctcgatatacacagagcatgtaagacctgagatatttagaaagttggttgaaccgattcttcggcagacctatgagtgctttcgctacaagatgacgtcggtttccactttcttcgatagctgcccacagcataggcgagacatcgtcaaaaatactcacagcgtcgtcagtttcactgccgttgtcactgccgtggtcactcgtcaagtccacgaacccagtgttgaggcgcttcgggatgataggaaaagtttgtgcatctacctgaccctccgctttaccctcattcgagggcaaagttgtcatcggtatcagtggtgaagctggactatatctgtggacgctatctgtcttcaggcggcgcctcttggcgaccgggggctcgtaattctcttctttgtagaaaagatggctgaggtcctcgtctgaagaggagtcacggaacggtccatctcgataagctgtgcgataacgtggctcttcgtgatccggtgcagcctcgttctgttcgagatcggaaacaagggcgtcttccgattgctctgatccgccttccgattctgatctatcttccgattgttctgatgattcatcttccatctcatcaccagtgtcgtgcacgaaatccgactctgaactgagagtttcttccccgtccaaattcacattgggcttttctggccgcggggtgcgtggcggacgagcaacttttggcggcgggctagtttgctccagaacggatagcttccattgatccaagaaaatatcgatcacagtgggatcgaggcatgcacatgcttgaagtaaggacgagcgggatgaatgttgcgcctctgcgagtgctttgcggagggcttgagaacgtttctccaggtgggcgagccgtgtcgagatttgacttttcatgcccgggagcctttggcccctggtccagatttgaaatgctttcggcagctctttcggcaaccgaatgtcgatgaactggctcttccgtgtatcaatgtattcatcgacgattttattaaactcagtatcttccaggttcccagaagtatccggagaggattgctcctcatcctcttccatttcctcgcgagtctctgtatcatattcggcctcggagctagaatctccaagaagtgggaggatatccgaatcgtttggggggtaagtcttagcaagataatcaagaaagtccttgtgcccaaacccggagttcggagcaggttcattgggagtgagggtgtccgggagagaaggtgtgggtgggcgttcgatgacggtggtctccatccggcgaggtttctttttcgctgtttggggtagtgagagaccatcaaggacaggagcggagctgatgagatcatcagagagggtaaggtcgatgtgatcattaataaggggggtggtattcacgggatcatcgaggccttttggagaaagttgtccattggggaatgctttaggaggaggctgcggttgctccaactgataaaactttggcgatcgtgcctgtagccatttactggctctcagaatatactggcactgcgagataattcttatgccaaggtctctcacctgccattctgtgatatagagcaaagctgagccggtgactagatgttctcggagggaattctcgagagccataagatctgggcaagccagattataagaccaatccccggccctttcatgacaaaagaatgtaacaacctcatccaccgtccagtggaaagggtctttggtcaaagtcatgtttgctttagggggggcctgtactagatcagcgggctgcggtccagacgaaccagtgcatttgtcccaatgacgcgacttgacaagggtcaagtttggaaagatccatcacttaccattttaaggcccccaatgcaaattaaaaatgaagtcagtgcaaaccgaaggatgtaaaagccgacaatgaagcattgagctgatgatatgtcaaagcgaagtgaacgaggagctttcaaagaaagagagccgggtatacgataggggagaagagaagagaagagaagaaagaaagaaaacaaaacaaagcgaaggaatatcaatcaaaagaaaacacgccaccctctttcttcccaatctctgttacgcgcgaagctctttttttgtgccggtgtttgaataggcggtgagacattttaagggcaattattccgaaaaaggaaggcgggggactcgggcggtcgagtctagatttctgcctcaggtgtcggccaaatgccccgccaattacaaatccccaagaaccttgggggagcctcggcgaggttggaatctttgaacaatctacgcaacttgagaaggtcgtggagtgccggagtaaatcaattcctattcactagcaatatggcagaatcaatttattcaaactatccgccagatctgtctccagctcaacaaaagtttcttgtcacatctgtgaaagactgggctattcaaaatggtctcgctgttcgaccatccccagcaattgtcccagctggcctagatccaaatggggtgctggctacaaatgcaccggtgacattgtttcccagtccgtttcctcggacttgcttcgaggaagccactgctctccaagagatctacaacaaactttatgctacgatcacatgcaatgaagaatggctgggaaagattgtggaagagtaaggatatttctgctctagtatggtagatgttcattattgaccattttcaggctcattgaagttgatgactttgttttgaacttgtggaaggttcatcaggatgtgaagaaggaaggatatgttcaagacctgtcactgggcctcttccggtccgattacatggcccatgttctgcctacaggtgccacggctctaaagcaggttgaatttaacacgatctcgtcatcgtttggagggctttcagctcttgtgcgaaaaatgcacaccgagcttctttcctcgccgccgggttcctcaatcaactatccaccccaccctctgctacaatccgaggttccaccggagaacaccgcagtggaaaccctctcagcaggtttggcggcagcccacgaggcctacggggtgtccaagtccaccccggccctacctctttgtgttctctttatagtccaggagtcagagcggaacgtttttgatcagcatgcactctcaacacagctcaagaaagttcacaacatcccagtcttccgtgtggctagcgtcgatatcttggatcagacatccattcccagctccaactccgcacgaccattgttataccagcctcctcactcacccgactcaaccttcgaggtaacaactgtttatcttcgaggttactatgcaccagacgagtacaaatccaaccgtgactggctggcccgaactcacctggagcgctcggcggcgatcaagtgcccttccgtgctcaatcagctgtctggctgcaagaaagttcagcaggtcttagcagagccgaaagggccagatcatctcgcaagcttcttgaagggggttgacactacgctcattgaaagagttcgagatacctttgctccgcaatatgacctgtcagttgacagccagggccgcgatctagccctcaacccagataccgccatgaaccatgtgctcaaaccacagcgtgaagggggtggcaacaatatctacaaatccgatattccaacctttttgcgatctattccggaatctgattggagaggctgggtacttatggaactcatcaaccctgcagccaatgcccaaaatgttgctctacggaatgacggcgaggtccttcgaggacatgtcatctctgagcttggtatttatggtaccattctttgggaaagtactgggaagattttgcacaatcaacaaggcgggtatctgttgaggaccaaggggaaggaggtgaatgagggtggcgtagccgcaggattctccagcttggacagtgctattttgttctagataacttagactagatctgacatttacaatatcaacggttcattcatacttcagctttctggcatttcgtgtaagataatatctacgacagcatgagtctcataacgtcattctggagcagatgcacagcttctaaatcgcgtagaagggagaaaaagtatatatggagggctaaatgccgagacaactctatgcaaagatgggtaaacccacacaaagcaatatgagagattcttctttggccatatttccctgcagcaatcaattctacaatttcgaccgacaggcctcaagaccagatggtccatcgtagatctgtttctctaccagtcgagtgtttatctggacaacatattggttagttcacgtgtagatcaagaccccaaactgagaagccggggtacgtacgtgctgtttcccgagttcattaacattctgcacgccgagaagtcgcatacatgtcttggtctcctcagtcaagactaagatctgtcagtaagtcactctacaaaaaaaaaacgccgagtttcgctgatcatactttccagtgttcttctgacgccgtccggccccccggccgccaaaccccaaagcggagctcttcctagcccaacaccatgagcacccaaacaaagagccttgaccacatcagttcctctccggatcccgccatcgacccacacttcgatcttgtcgaagacctcggggcagtatttccggatttcgagtagggtgtggacagcaggaggagccgtgtcaagagaccgaccaccgtggtttgaaaggataattcctttgacctggggcgtatgttgcgtggcaatatacgcgtcttcgtgtgtctgaatgcccttgagaacaaccggaagatcagtgtgctttgccaaccagccgagggtctctctccatgtaagcgaagggtccattcccttgaatacggggtctccagactgggtgggtggcgcgccctcattgttgtcaccctggaatggagcctcggaagcgatgacgtttccgctgcgctcgtcgtcctctcttttcccagtcacgggggaatccagtgtcagggtcacgaatttgattgcactcaacttgttgattcgagccagcatacgttcgctcttggttcggtcgttctgcacatacagttgccagccaaagacttggcccggggcggcgcctgcgacgatctgctcgggcgtcatcgacgcgctgttggaaatgatctgcattgcaccgaagctgcgacatgcttctgcgattcctgcttcaccagtggggtgccctaggcgggccatagccgctggggaaacataaattgggagagacacgggatttcctagcaattttgtcttcaagtcgcattgtgtacagtcgatgaagacctttggccgcaattggatggagcggtagacttcgttgtttttgcgcttgctgatcttgtcgtcggatgccgaataataataggcccatgcctttttattcactattttcgtggcggcatcttcgatctcatccagattgagcaacgtttcgagcgcctttcgttccattttccctatgccgtctgatcccacaaagtaggaaaagggaaaagccgaggcgggaaaaacaggggtgcatacgcgccggatactttttcctttctgggattagtgccgtcgccaacggagaattaatatgcgaaggaacgacatgcgagggatgggaagtactacaaagtactatcaagtaagaaatatggaacaatatacaatacaaccgtgggctataggccttttgaacaagtagaatcaataaaccaccgattttagctctaggtaaccttctggccgagacaccggaacacttggcatttgttatgacgatgaatagtacccctgtttcaaattttaactttgtattctttttcgttggtatcattttgtatgtttttctatagtatgcattgtctactgtctacgcctgtctacaggcttgacgtacaattaagcgcttgaatgcatactccataatctgcagcacgagccctaagcccactcatgatctggacgattcgcgaccaaatcccctcttattccccatgaaatctgcttagaccaatagaaacacaatacaaaattctcctggagggctaaaattaaacatgcggacgtgtccgtcgactccaccatagtctagattcccgttgaaacgctgctgtcaagcgaataggttgcccgtgtttcattttgacttccccttcttttttcttccttttcttcgtgttgaggcttctagaagaccttctcttcccatattcgacattcgtttatgtatttcctttcttctaatatttgttgagatcattactgtctttccttgcttctagtcaaatctattgaaatcagaactgcccagttccgacttcatccaccttcgtttttttttttttttcgttttttccctttctttctggttttcttcatttcaccatggccgaaggccacagtgcccctgcagctgaggcgccggcgccagcagcagcagtagcagcagactgtactgctgcaccagtcgccgcagatatgcgctcacacgcccatcatcaaacggcaccgatccatgagcaggagcaggtctcctttggacccttgactcatcggccaacattcttggaacacctggctacctcgcgagacatgcaattcaagcttgatcgacgggatacaagcgagttggaccggtactttgtaagtcatggctgcgagatgatctatataaaacacgaacagaagactaggaaggatcatagacaggcaggctaacatactcttgacctagcatggcccccgaaacatggaaaagcattccaagtggccgataatgttgcgattgcacggcagtgtcatgccaaaaatgatcatgccgcttgtaactatcgctctctggtcgaccgctgttactgtcttttcgaagctggtccatgaccgtgagtaatccccaagtgatagatcaaagaacattctgagttatatactgacgcgaacaagtcggtatcaacaacatcctgctcaccgtgctaggtttcgtggtaggtttggcgttgtcattccgcagctcaactgcatatgagaggtatactattccctggtttttagcttcaactcgagctatacactaaccgcttgcactgcagatgggcagacgggcgcaaatattgggcccagctcattcaaacgtctcgcaacctctcgcgtacaatttggatcaataccggcgagagagaaggcgaagcaggaaaagatgacatcttgagaaaactgtacgtgatacctctggagtttatcctggtatcgattctaacaagctgtctatagctccgcgatgaacctcattctggccttcgccgtctcccttaaacacaagctccgcttcgaacccgatatcgcatacgaggatctggctggcctggttggacaccttgatacctttgcccgtgatgcccacgaccgcatggttgtcaaccctccgcctaaatccacttggaagtccgcaggagagtaccttggcatgtccttcgccgagtcaaaccctcgcaagtatgtcaaacggtcgaagaagcctctcggacatttgcccctggagatcctcaaccatttgtccgcgtatatggattcatgtgtagtcaacggtactctggtttcgactctgcaccaaggacaagctagtaagtgtctaaccccctatcttgtgtgctccaactctaaccgaacaaaagtcgccatggtggccaccttgaatgagatcttgaccggcacagaacgtgtactggacacccccttgcccaccgcatacagcattgccattgcccagatctcatggatctacatcctggtacttccattccagctctacaatgccttagaatggatgaccattccagcatcgattggtaagaacaacagaatcctcccccctacacaagtccaaaagaaattctaacagaccccgaagtggctgcctatatcatcctcggcttagccacgatcggcagcgaaatcgagaaccccttcggtcaggatgtgaacgatctcccgctggacacctactgccgacagatcgccctggaaatggatatcatgactgctgtgccccgaccaaatgtcgacgacttcatgtcgcgtgctgaaaacctcgttctattccctcttagccagttaggataccctgaatggaaagagcggagcgtcgacgatattcgcagcgcacttagagctaagatggtcgccagcccgtcgtcttcgtcgtctgctgcatctacaatttcggaaagcattcgtcccaagactactgggtcatcagtctgatcttcatcttccttgaaaatctgtcaccaacaaccagggggaaatacaaccggtaatcttcctggcagggtgagaattaattgtgcattttaataagcggcatcaaattgtttgtgataattgacaaacgcgtgggtcatggcgttttcatttgagtcatgttgactccaaaaatcaaccacaaaaaaaaagggagttcattcttgtcttgcagttgcagttggttgcgtacatagattgacattgtctccaaaatttatttcctttgtcctcatcgcacgcgaactttccaaagtgctagtatgtatgtcttcagccgccgatgtaggccaattgtctgtgtctcattccttcccatggagctagacacaagcttagtctcaggtattcgattattgcccggctcgcggtagggaaccaagccaatctcgatccatttggagctggcattgccgtcgcatatatcgtgggcggttactgcagcagccctgcagccacacccatgcctagtcccacgtagtatgcacaacatcaggcgtgaattgcgagtaaattcggatgggcctcgccatagcccgagggcaatactttgacaaagagtcaaaatatatagactagtcatagttcaaaatcggttctcgtactcgctttgaagcaagagtacagccagcaagtctagggaacgaataaatcggccccagagccagcaaccagagcacctaggaagtttcccttggcgcaaactctccacgcaacatctccagagcttgccgaattatttccgccgccaatccatgagctcacggcgctcacgacggctgaggcatcctcgcgagggacgcgaatccacataatatggtacttcgtggttgatggagatccgtcctcgatctttaggatgtcgatcggaatggctgttcctgtcaggccgaggaattgcgacaatgcggaggagaggtaggttcgtgcggagagggcatcgaggggttgcggtgcacttcctggttgggagacactaaaattgcaatgttagctttatttctggcagaccaaaaaagccgacggatagcttacagcttgagcttgaggtatgtccagggtggattgcgcgacgtgaaatggataatttttggctttggctctggcgctttgcgcttcgcagcttccgttacagcgacatttgtgtcaatttccatgtcgccgtgtgtatcctctgtcatactggctagctttttgatctgttcggggtggtcggaggttgatgttcgcccggagctccgccaaaaaaaaaaaaatcacagtgacggcgtcacgggatcaaacaagaatcgaatagagacaaaaatatgagctagcaagtgggaatcaacaggctttaaattcgaaatttatactaggagtctcgcgtattgacagcgtcctttaatatttgtgtcgcacgctgcaagtaggcttcttcgccgtcgtctccgatctccaaatcggcaacacacaacgttttctctcttgatttcgcgccacgaataattccgacattcgactttggaacgttaaatatctaacaaatggtcagatggaaattgtgactgactttattccctagacaagacgggaagcaaggagacacattaatagcccacctctgcgaagacacgcgacactgccatattagatgccccgtcgcgtggaacagcagccacggcaatatcgactctatcaatgccaacatttgtaatacctgcgcgacgagcagaggcgtttggcttcacatagcaagggatgtggaggttgaacagtttccgagaacacggggttttgctagggacgaggcggaggaaagaagccgggctggacattttcagtcgcggtcaagcgaattctacatataattgtggatgtggaatgaagaggttcgagtagaattgattgcagtaaaataaaggagatggatgaagtggccaagacagtcatcgtttagccctaaatgggcgagccgccctacacggtcgatcccaaactagtgctatcacgctttatccttagcatacagtcaagaaaaagttgaaactcataattttaaacaaggctcagcttgcgtattcggctcccacggattccggagctcaacaacaagccaagcacggccatcataacatctagaacgatagatagccacctctggatggtgaataactttggcaatattgccaagtctaactattacgactacaatcaccaatgtagcttctaagtagcatctccacgaggatcttctctagcctaagtgttccgctcgtagctttagggaacctcttcggggctcaactagcttggatcgaagaccggtatatattatcggtctcgatagtcggcagataggcttatatatatgaatattactacgacaagaaaggtccgggaaacaacattgatttatataatacaggatataatgataagttgataacaagtcttcatgcatcggctgcttcatggattgagacaccttggaagaatgtctccaggcgaggagtcactggctcagctttccgctctctgcaagacctcgcgtgtagctccagaaaaatcttccttcagtatataaagaagtacttgctaactcaccttgctcctttggttgatacggtagaagttgaaggtcacgctatccgtagagatcccgtagactgttatatctgtcttcacccgctcgatacagtcggacctcggggggataagggccaccgttagtataaatgggaaatgttatttaagtaaaggcatcggctgagaggataacgagtggcgagggaggatcctgccccggtccgacatagagtatctcgtcgacgatgcgactgcgatgccgcgatgtgcgtccctcgggtgagtagtaatctccccacaaacgccgctctgaatagagaacaccagcttctaccggaacccaaaacatatatataggaacgccgatcgatggaggttgccgtctcgacatgagtctcgtcacacccctacttgccacctaggatagagacttctcctaggcactcgcttttcccggatccgcatcatcttccaattccttattcaggtaacgcagaactggttgcgggactgattagttggtagcaactcccacaggcaggttcgacttcttcttcggacattcgtatgtcatatgtcccttttccttgtacctcggaggctatcttggcccacgtccctaaatagcaagcccccattcaaaactagcaggcagatattcggcggtaaggtattcaaagcggcaagcagcccggctttcgacaaatattgtttcgctgcgtgctgagggctaagcgttacagcaccggcttgggcttgaccgtgtccaatcaaggcgattgtggtttcacagcttctttggggttctcatccataacagcaggtgtgcgtcctgtaccatggtgaccttattaatttcttccacggtttcgacccgagtccatccgcttttgccagctaacagcgctggccccaaaatatcacgtcgtcgaatccttagccattaattgtttcaagtagcagggcgggagacgatggaaacaccgagaaccacggtttgagcatatgcgcttgggaattgacaccgtgatcgggtgaacgtataatggaagcgtttggtctccttgatattggcagcgtcgaatcatacaatgaaactcgaatatataattaagcgcaaaggattgtggatgttgcatgggatggggtaatttaaatagaggtcgagaaggaaagagggagatgaacaagatgaaataccgacttaggctcagccttgaagtagttagtaatgagatctaagcgatggtatatagtataaaaatgtgtagagtaaggtgtagatgaaagacagatgagagatagatgagtatgatgtgatatatagaagagtgacaacaaacctatgagttagcttcggctcaggctgaaagaagtcaggaataggatctgggcgatgaagatatacaacatgaaggtcaggtcacatgactccatttcttgttcctaccacaaacctttagttccttcctttttcacgtaactaaagtcatctatcttcatagaccacctcgggcagatcaccattacacgatgggaccgaagaggcgtggagttcccttcccagcctagaatatggaaaaaagcacgaaaaatatggcaccaaactttgaaaggatttcgaaagagttcaaggaagcatccaaatccacattcccttttaagacattcattttcgatccagatcgcagactaagaccaattttgtggtcaccaaaggaaggtctacagcggcatcatctgcttagtacgacaatttaagacctgtcattcacaaatgatccatatcgcggtctccgaaaggagccagatgctcttctccacaatctatcgcagccttttccagctcttatcgcagaggttggatggagtgagtcgtataatgaccttcttgatgacatgaatcggttactcattaggctagaagtctccaattcgcttcatgcctcagttgaaattgcctcagggcttaatatcaccaacgaggcgcttgaagtgcagtgccgtgcagcggcgcaaatcaaattgtcattcttgttaattggatgacggcatattttttctgtatgtcttctttagaatcttctttggcatcttccttagcatattcttggtgaaaagcactcttcaagcacaacaggagaagcatatccatccaattttccggatgatagacccagtagccaagaaagatgccaataaagccggccagcataaaagacaaaaagagaacccaagatcttggttatgttataggagatttcattagggaccagtgtaggacagggtaatttaaagagaagatgagaagtagacagggagatggagaaaagaaacaagatgaaatatgtcgaccactaactatgtaccgaagagatgaagccgtcacccgactccgttagcacccacacctctattgcaaaagagactcaagatctgcaacacgagtacctctatcctcgaccttctttttcgtctctcggaaagcagcctgcattagactcctcttacgctcctggatcgccaacacccgctcctcaatactatcttccataaccagtctccagaccgtcgtctcccgcttctgcccaagccgatacacccgatcgacggcttgatcctcgatagcaggcgcccaccaactgtcacacaagatgacctggtttgctgcaacgaggttgagaccaacactgcacacgctcagacttgcgaggaggacagtacactcggggtcgttggagaatgagttaatggagttgtcgcgtttcacagactgcatcttgccatctacgcgggcgaacttgatcccgcgctgcttaaggtgtggctcgatgagatttaggaatgatgtccattggctgaagactacggtctttgttcctggtgcctggccctgagcagtcaggatcttgactagggtctcaatcttgctgcttggactgtcggggtcggcctcaacgatgtcagtgtcttcacccagttccgcagctggggagacgagtgtgttggtttccttgatatctgcgcggcagagcggacacttgtgttggcgttcgataacctgctcgatgcagccccggcaataggcgtgggcgcaggcggttatgacgggttgctctaggttgtcgaggcagatggcacacagttcttggctttctatctggagctgcagcatctcttgtagagcacggacgttctcgggtgtcagaggcacgactttgtgttcctccaacatgcccatgagtttgtcgatgcggtttttgcagagcgcccagtgattgcagacttgacgaagtcggagaagaacctcgagaagatgagagtatttagtcttgccatctttgtccttgaagtcgagaagagcaccctgggcctcggttctatgattgttattagcaaatttgttttcactgtgggtagtcactcgatacatactggaaagcatggtacttttcctgttcatgagcattgaacttgattctaatgagacgagacgtcatctcgggtagcttcaaattgataaagctcatatccttcctacgtcgtaagcagatggtgcccatgagagcctcaagcagcagtcgagcctcgggctctcctgcagttaagggtcgaatcaagacactgttgaagatccccaaatcttccaatccaccggaaaacttaaggaaacgtatttgcgcatacaaatccttcagagtgttgataatgggggttccggtcagggtccagcgggagtcggcacgtaagccacaagccgcaagggaggctttggaactgggattgcggatggtatggccttcgtcaagtacgacacgacgccagtgcaccgaaaagatgcccttagctggcgtcttatttgctttcgggttgaagtccagggccagggctccatagctagtgattacaacatcatacttggccaagtttgcagcttccttcttcccagagccgtgatagatcaagacactcggggcggtctccttatgggcgtggtcttggatctgatttctccagttgctcataacaccgacaggggcaatgatcaaagtggtcttagaggagcctgcagtgagaggctttgcatttgaaagaatcaatgagatgatctggattgtcttgcccaagcccatgtcatcagcaagaataccaccactggcgagggctggctccgtggctgtggcataatttgttgcgatattgagaaagtcattatttttccgcttccacaattgcacgatatcatcagagccccttgcgggaaggcttggcgattcttgcttgatcatccaagctagtccttggcgctgatatggaagcaactgggtggaaaggccggctggagtatcgaccatcggcaaattaaccaggtcagactccttctgtccgaaagtttccacaacctggccaatatctcggggattgaaggtggagctctggttaaggagttcctccaagctttcactttgctcgccaccaagtcccgttggaatcgagaggttcgcatactctgggttctggttggcttgccattttgcagctttgccaagagccatggcgcgagctttctttgcggcctccttctgctgtttctcggctgctttctctgccttgcgctcctcgtgctccaactcgttcatttggcgcacaggaagcttgtccttctgcattcgttgcttcagattagttcgtctggtaggctcgcaagttccgaacagtttcaaatcaacagggcatgtataatccccaatcgcaccagtcagcgtgccttcaataatgagatcacgagcatcctttgatgacgaacgttagcaaaatatcggaagcaatatgattggagattcttaccatatatgacgccaacttagctgccatctgtcgtggaatgtggccgatttgggcgcccatgacattagtaaccttaatagcattgctatcgtattgattattagaatcccgaattatgatgacccgttcacctgggctggcacgacccctgtaaaagcgtacaccaacgatctttgtggaaacgatacctattgggtgctgtttagtatggtttctagatcatccgtacacgagggaccgagattatgtggaaaggagcataccatagaggattgagcttgttaaagaggtttcatccacttcctgggacccttgaagcacatcgagcgcttcctcatcctcttcatcggcgccaactacttgcgacaactgattcaatggaatgaagtcggccgactcgccaaatctctggcccgaactagtatcctggtccaacggaatgtagtcgacagtctcgccgaatcgttggcctgggctggctttttcggtgttcaaagtcggggctgtgcggatgatttttggcgcacgaccagcgtctccggtagaactgggggccttgcgttttactaccatttccccccggcttcacccaacaaagttgatataaactttggcaatgatgatgatgtggagattgtggactctcggagaagtgcaaatatgtccggggccctgccctctcaaaaaaatactctcgctatgacaaattcaaaaagcaaaagaccgcgcaaataactgataaagaaattgttgtctccagagcttgtcatatagagcgctaactatttgtgacgcgtcgagacacggcttcacgtgaccggggagaaaacggataagtcacgtggcatcgacgctgataactcgccgcccgctgagtggacgatcggttgacaccccgggggcgagacccacggggggtcttcacaagatagttgattagtcgatgtatgaggtacgataacaagctgattatcgcgggcaatttatcgaaaatattcgtgtcctgagctctctcaatgcatcatctcgtccagagtactgtttcaatcgtctggatatagcctggatatagcccggatatagctctttgtcgtgcggagaacaggccgacggggtatatcccgttccccggattttattcgttccaaggctgtcggggagttcccaccagtgtcttgacagccctcttcctacctctttgcaaattatgtccgtttcgcagctcaaagtgatgccgtcctatcagccattccaatgtctcatctgtcaaagtcgatttactcgacacgagaacctcaagcgacatgcaacgctacactcccgttctcaggccgaggcgtcgcttccctgcgacttctgccacgctaccttctcccgtcccgacttgcgcaatcgccacatgaagagaaaacatccagagcacgagcagcaccgagtgacgaaaaggacacagcgtcaaccagcacccagacaagacaggctgaattcttctgtatcgccgacagcaatctcgcctgcaggaagccagggtggcttgccttctcctggatctgtgcattccagtccaggagaggagacgaggtttgatagcgatgcaatctggcatccagtgatgcggtatcagcagcagttcgacagtggccaccccgcgcaaaacccaaatattcctgcgccggggaccgggatagccaagacgcaaccgacaagaggcctgttacaacaatcgacgacgagtgactctatcctcatcgatcagattgtccaggacgctacagatctggagcggagcttactattagggacatccttcctgaaacccaccactcaccttgacaaccaactacatccgatggccaccgcacaaaccgagccactcaatacaagtctagttgaatacaatttcgaccacccgattttagatagattatcgccaaatgacatccctcaactccaagacgattgggccccgagtcccttacaaatttcacgaggctgcaacttatttttcgcctcggtctctcatttcctcccctttctccattcctcgactttcgatccgacacaagttcctcctcatttggtcctcagtatgctctgcctcgcctatcaatacggcgaggacccggaatgcggggatcaagaaggctcaggcgaaagcttttctatacgttgctttcataaagctcgagctgtccttgcttctgacgaagagaggccggacgcttcgacgatgatcaccacactggttcaatcatacctgctccttgaaatctgtgccatgatgtacctttgtggcgacaattcggcgtgcggcctcaagatgcattcgcacataatctccctggctcgtgctggacgaatgacacaaccaatgactgttgagtctggtgcgaccgcagatttggagtcattatggcgggagtttgtcaaagccgagtcgcacaaacgaacccttttcgcggtgcatcagatcgacgcactctggtaccaattcctttccattccccgctcaatctcacacctggaaatcaagcatgatatgccttgtccagaagaccaatggtcatcatcctctgctgctgaatgggcccatcggcagctcgttgcaagaaatggcggcccctcggtgacatacaccgatactgttcgacgcttcctttcctctggtgatgagatcgcctcccttccatcatttgatccgtacggcgccattaacatcgcgcaatttctgatctccagcgcccgggaaatctcaggctggtccacaatgacgggaatgctgagcatggagcgattcggcgcattaagatcatccctcgtcgcacttagcccgtttatctgtcccggtaaccactcggcacaaacaaagaacgtgactccatctgcaacttgggagactgccatggtcgagctgcagatgtggtcaccatcccacactggtggcattgtggaaggaagcatagatgccgttctcagtcagtcaacatatttgggaccgtctcagtttctgtgcgatgccaacacggccaaagctatacaaccacatgtcaactggttcttacgatatctcgacgagacgctcatgttggactctgaagcgccatgggttactctgtctgcgtacaaagcctttctgattgcctggcagctaatacatggtggcctgcctggcgcaatggaagttgtgggcatccgtgatggtgatatggagggagctctgatgtgggcgagaaaggtctttcaacgaagacggaaatggcagattgggaaactcatcttgtcttgtttggatgaattagagaaatgaattacggtcttataatgctttaattatttacgaatgtgtcttgtgttattattttgcaggtttgaacaattcaatcattcccaagtataatccactgttattttcatttccctaagctagaatatcccataaccatgtgacaataaacccataccgatcccagcaaacacgattaacataataacaaaacaacataatcattgatcagtacatttcgtaacgccagccgagctgtaccatttcctctgtgacgccacccttgacgaccttggctatttccactggatctcccgagtccagacgtttgttctcgcgcagaatgagccagcggtatatcgtgattgtgatagcgaacaagacagcagcacccataagcgtgccaaaggcaacgtagaaatgaggctctccaaagtataggtatgaggcccagatgttggacgtaccaccgatggcattgaccaaggcagaggcagccgctcgctttgagatcggtcgtgcaaggtgcaggttgatggtcttgtagaggagaagttggggaccgacggaggcgaatggcagtatcatcatggagaagtagcgggcgccgacgttcgtagtcgccatcgggatgatgtacatcgggatcgagatggcgatgcacatgaggatgatggggtagacgaggttctttcggtcggaccagaacatgaggccgtagtagacgatgccggcgaggatataggggggtgcggtgaggagcaaactgatggtgctggagaagttgagcgagctcacgagggtggggaagtagttggcgatggagccttgtgtttgggacagcatgttgcacatgatgagcagcaacagcttggggtctgcaagggctttcataaatcctttcagcacgctctcgttctctgtgccctctgcagcaccggcttcggactcgagacgccacacggcgcagtcacgctcaagcggggagaggatacggctgttgtgggggaattctggcatgatgcaggcacagatgatgccgatgccgacggtggcacagccctcgatgatgaatagccatctccagccgcggatgccgtggtgtccatcaagttggaggatggcggcagcgaaaagaccaccgaaggcattaccgacttgctgggcaatgtagagcccggcaatacgctttcctagctccttctttgtgtaccaggcagagaggtaatagatggctccggggaagaagacggcttcgacggctccgaggatggctcgaacagcaaggagttgaccatatgagtggactgccgctgtgcaagccgagatcgcaccccagatcgccacggcaccacagatgtacatgcctggtcgggagaacttcgtaatgatgaggttgctgggaatttggaagggcaagtagccgacaaatagaatggaaatagacgtggcgaattgctcagtggtcatgttcagatcgtccatgatgccctgaagttttgctgcactcaagttctgacgatcgatgtagttcagaatgtacaggatgccaatggttggaaggatgaagaagtcaatcttgcggacgagcttcttgttgatggcactgaactcatcgtcgctgagtccgcgaagggactctggcatacggttgtaggcatcgagttgcccttctgctgacgagacattgtcttcagccaggatagactctttcttgtccacagggaaggacatgacgacggtagtacttctgttgccaagaccacagcaggtataaacgatggagactgtgcagagtgatgcaggttgcaggctatgtcctccagacgatacttgagctccccctatatagttcgacgcagtctctgcccttgtcggcttagcgtagagtcattacaaatatccgatctcggtcaatagatgaccaggatacctgttcaaaaaatctcgaggcattgattggtggagattggtcgaggttcggtcattcgtagttgataagtgagacgtgtagataggactggagataagcgcaccaacgagcgtccaatggttatctgtccaattggaatcgactaccccggatggagagtttggttgaaatctggggtgcatggagctaacatttgggaggagctcccatattgtcgataagaagtttttgggaggtgcaggtggagatttctttcaaacgcagacgagcttagtggccatgtagaatatatctctaatcataggggcaactcacatacaatattccaatatttcgggagggccgctaattttggccgttaaacaagataagccactccgaagttttgccactagtctgccctaactccatgcaagagctccatgtttaccatgtcgaagctccgcattttagcttgatatttccaatcttagtctaaataaatgaggggcttaagaatacgtaaaccaataaatgatacttaagctggcataccatcaacatcttgtcttcatcttactcacaaacctccaacggacaataccaaaccatcacctctatttccaatatctactatcacaatggcttacgctactcccctcactaccacgatcgataaccctcgcttgagacttctcaacaagctcaaggccggcgagtacccgctcatgaccttcatggccatcccctccatccgccaggcccagatcgttgccttgaccggcgtcgacggtatcattattgattgtgagcacggtcacattggtgacgatgctatgcacaactctgtcgctgccatttccgcccttggtgtctctcccgtcatccgaatccgtggccctgcccacgatatcctcaagcgtgccctcgataccggtgcccacggtatcatggttccccagatcaacaatgctgaagaggccgcacaaattgtcgcttcctccaagttccctcctcagggtgttcgtggccagggttccgctttccccgcaattgcccacggcctcaccactcctgagtacatgaagtccgccaacgagaccatcatcaccatgattcaaatagagacccgtgccggtgtcgagaacgtcgatgctatctgcgctgtgcccggtgtggacgttgtcttcattggacccaacgatcttgcccagtccttgcttggatacacacctgctcgcggtgacgagcctgagtttgttgctgctattgataagattattgctgctgcgcgcaagcatgacaagtgggctgctcgcatggttaacaatggtacagtagccaaggaggctcgggagcgttacgataccgtcgccattactggtgacaccaaggcgattcagaactggtacatggcagagtttgagattgcccgttcatgacgattttatgttaccttacgatagactttcatataaaaattttaaatagacaattttgagtttcattacttcttccccatgaaagtttaactacggataacatccgatctagctcattacgtgtcttgctcggtcatgagaatgagataaaagccacgaatccttttcaagccccgagacatattcccttgctgtctaatctatctggccggaaacagaaaaaaggaagaaataacaattcatttattcgcattttacatgaaaaaaactgctccaccgccgtgataatgaagattgcccttcgtcttgattggcaacacgcttgatttacgagcagaagcttaaatacgaagtagtcacacacactacgtaactaatatttctgacttccgggagtgatccgcacttgattaaggccatatttagttaatatagtagttaataattacatagcatatcgttactctacataatatgggcaacttgatactcagtccaaaaagaattttatttttcgtctatattgtagccattttcataatatcataatttatgcttgcgcgatgcactcaatctcaataacggtaccgtttccgggggcaaccgcctgaaggcatgagcgagctggcatgggttgtgggaggaaatcgatgtatgcctcgttcataccagcgaaatccttcatatcggcaaggtagacgttgaacttgacaacctgctcgagggaagagccggaaagctcgaggacctccttcaggttctgcagaacggttctctgtgtgaaagcaaaaaaattagccaatgccttgacacccgataattgtttgtgcaattgaacttacagtagcctgcttgatctctcctgtggcagtttggcctgcgcagaagacgagtccggggactttgacagcagggcctggatagcttggtcagtgatgttctttctttatttattccaatagaatgcaacatgttttgcggccagatactcacagttgtgaggcttggtagggaacttctcgctagagatgagttgacgagacatcttgttggtagtttgaaaaattattggagtgtgttgatagtgtagtttcaagagtgtgtcaagaagtttgaactccagaagtactagacaagagcttgtttaaattgctcgagctaccccacacgcctctctatccgaggcatgctgctaatcaagaagaggggcaattttcattatcacgacggaggagcagttattttttgctaatgatttattcgttatcactttcccagcagatatgctgggaggagttgagtggggagtagagtggagtgggaggagtgggaggagtgagaatgggaggagcacaatatctggagtcgattattgcggccatgtttgtaaaaaggtctctcagtgcgtgaatccccgcgcagtaagcaaagctgactatctggccgcaatctatgcttgtatataaatctaactcccggcaacacccggtggagatcgtattccaatccaggactagcgcaaaccttgtagattatgcttaagcgctaacgtccatagatgccctaaggtggaggagcccccgtggttccgttcatgataacgaaagatgacaaggcgagctgaaaataggaaaaatgtggagaagtttagcagggagcacccagaatggcaattatcatgcccagaatccagtggcgcactagcgtcgataaccctcctgctctcatctcatctaatccggatgatcatgccagactcacctccccggatatcggatgcacagatagggtttcatgtctctccattcgattagtataaagatatagaactcgatcagataatcttctgtattgtcttcagcatcgatcacaacatcgaacagtctttgaacattctttgcacatcaactaccatggccgtttctgctcccttcaatcctccttcggctgacctgcctggcaagccttttgtcccaacatgggttcccccgccgatcactcagcaaaaggagaattttgctgagcttagctccattgatctttctttgctggactcggatgaccctgctgttgttgataagcttgttcagcaggttaagggcgccattcgtgacgatggattccttttcctcgagaactacggaatttccctagagcaggtaagtcttggttcttaggatattctgataccaacattgctaataacatctttcaatagctccaccgccaattctctcttgcccagtatctttaccaaaacatcagcgaagaggacaaggaacgtcttctgttcgatcctgaaactggtgtttggtcgggttacaagcacccttacggattcaaggtaagaggatctccctcatgcatcaagaaaatccaagcctatacttactctccctttttgtgattagcgcgaacgcggacctgaagacggtatcgaacaattcaactggtacaagcccgactggagcgacatcaaccgtgtgcccaaatgtcttcaccccttcatggacgagatcgaagagttcgccaactacctgaccaagtccgtcaaccgccgcctcctgactctcttctcccgagtcctcgagttgcccgatgactatctctgggataacgttcagtcccacggttgcccaactggcgagggctacttccgccatgcgcttttccgccccgtccagaagaagaccgaggaggcatccaagggcctgcgtatgcacggccacaccgactttggtctgacaacattgctcttctctgtgcccgtctcgtgtctccagatttggggccgcgatgaaaagtggtactacgtgccctacaagcccggtgcgcttgtcattaacatcggcgataccctggagattgtctccggtggccatttcaaggctactcgtcaccgtgtttacaagcctcctgtcgatcaattgcaacaggagcgtctctccctggtgctcttcaacagttccgttggtgatttgcgcatgggtcctgccacaggttagtagattcgcacattggttaaacacaaggactacgctaacgtcatattttatagcttcgcctcttatccaaagagtgggctgtgttgaggaacaaggtgtctacaaggagttcaagagcctcacatcccaaggaaagcttgtgcctaccaaccgtcaatggcgcgagatccagatcgctaccgctactgatcctacggatcaagagcgcaaccgagttggtgctgaccaggttcttattgatggcaagattatgcaccaacgggagtacatgggtgtcaaggttgtcctgcctgtttaaaccaaaatgcagccaatgagtggaagtgtttgttgttttgatattattacccctgttttcctggatgatttatgccgacagattgtatgcaagattcatatttatatatagcgttggaatttgagagttgttataattatacatttccaatgtgtaaaatttgtagctcactgcccaagtgtacatacagccacggtgaattagggacgctaaatatccttaacctatcatcaaataataataattcttagctaatgttcttagaatggaagttcagaaattgaaaacggaatactgttacagcttctttccaaatatccccatattatcattaaatagagactagagtccctaaagcactaatcccaatgaggccttaatagagagcgtagcagtgtagaggtgatataagttgtgtctttggctatgactcaatttctacaactctccttggctgaggcaggacaattgtatatcatctcacattgtggtttgctcctgtcttcgaaagtagtattattgagatcttcgactgccacacaaggactgtgtaaaacttttatttttattcttgatatcgtgaaaagagcgagaccgctgttaagttcagaaatatgtgaataaaatttggctctgattctaaaagctattttaaccctccagctaggagaagactctggcccgtcatgtacccagtcttcgctagcatagtaacaacattcgccgtttcttctggagttcctagtcgcttaagaggaatactctctaccacttcagggtacgctgccgcagaggaaagcatgcctgtaccaccgatcatagctggggcgacgtcgttgacactaatattgtactctgccagtctggttgaaagattcttcatcataccggtaagaccacccttggaggctgcgtagtctagattggaaaactgaatcagcaattgccttcaaggaacaaaaggccagtggaccaagggcagtggattgacttacgacagccgttaattcctccaccctgagcggcgatggaggacatgaagatgatccgcccccacttctgggccttcatgtgctctaccacgcctttgacaagaatgaaggcagcgcggaggttgatattcatagtgaaatcaaactcctcaagtgagatatctgacacgtcgggaattcgcttgccatatccggcgttcgatataagaatgtctggacgctggccgtgctcaagatcaatttgttgaaacatagcctcgatttgatcgccagacccaacatcaacctggtggattgaaatgcgaaggtcctgcgtggcattcttggagcgtatatctgcgacaatattgttcatggatgtcaaatttgtcgagtaggtcaaggcgagatgaactccatgttgtgcaagttggtgtgcgcaagctgcaccgattctagagtcggccgcaaattagcttcatgaccttgtataagctgtggatgttccgcttaccctccagatgcgccggtgattacggccaatttacctcgaatgtcgttgaatgccattgcgaatataggaagtgcaagtatactgatccagctaagagattaagatgacacagaacaagatattgaacattgtgggacctcaatattaccccggcattggagattccccgttatcgaaagctattcctgacagtagactgcaggtcaagattgccatgatacggagtatcttccgtgaataagaaaagtggatagagtgggttcgtcaatgaagggagctcctcccaagttgccaacgtcagcagccctaaagatagatagtgacaaggctattcaaagcaaacctcattatctatctatcgttaatattgagttctgttaatctcgagttatgtgttcattctccaaactttgttttcggcgaagatagtcagttgcgctcatggaaggtggttgtagcaaggggaatcgattcctgaggttttatcgtggcctgaggcattagaggtcacacttcaaggcacgtgatgatatctgtaaacgtcactatcaattaagagcaatggcctgtgaaaggcgtggattcctcaaattccgaatcggtcatttttagcgcatccccgcgtactccatattattgaggcattagtggcgcccccgtgttccacatggccgatccccgctatggctcctacagggatctggccaaggactatgagacccgacttgataccctaatagaacaagggatctttaagccagtttttctatatcatgttgtcattctcaacattatacccttgataggtctggtcattcctcgcagcaagggcggacaatatgttcgaaagggccttttcgtcctctgtattgcaattgcaatcgaaattttccaaaatcgacgggcaatcatcggaggaaatggctacatgcttggtttgatgaccgcgtggtggttagtatggaatgccacgttgtttgtgtttacagaccttgaacatgatttcaagcgcattgaacggaaacccgtcgatatcaagtcaaatgacgccaagacgctctgctcgaacaatccaacatgtacacaacaggacagcaacctttttatttggcggtcatatcccaaaaagttctggcatcgtctggaatggtccgctggactgctcttcaacctgagggggccagagtggaactggcggacttcccatctgggtcctcttccacgaccaattcacgaccaattgcatccaggattcgtgggtaaaataaaggcacatgaaccctccacatatcccaacggcaaacaccgcttgcaggctgcctttcgaaagttcctcatatcttaccttgtgctggacatcttgaaagtcatagtcctgatgcctgatccatactttcaaggcctcgctccggctgattcactatcaccatttcctttcttctacttcacaaattttacattgcatcctgccatatcccagatctgtcgtcgtctatacagcgccataagtgtatatactgcactcgagttcgtgacatcgctcaatccaatcttcttcctggggctatctcttgcattccccaacggggctaggaagctgaccgccgcaccgttgggtgcttcatggctatattccgatgcattcggcccattcttcgtcccggtccttgatgacggattggcgggctgctggggtcgttggtggcatcaaatcttccgatacggatttgtagcttcagcacgctggatcttatccgtgcttccggtcggcttggcttcccatccccaagtccgtcgtgtcacttacgtaatggtggctttctgtcttagcggctttgtgcatgcctgtggaagccgtacccagattgcagatacatctcccgtgtccgggccattcctatttttcgctttgcagggtgttgcaatcatggcggagcaggttttcaagacatcggtcttcccgaaatcaccttttgcccgtgcgccgagatggctgagacgaacgactaactttgtgtttgtattttgttggttaatggcctcaggtgggctcatcgcggatgactttgcgaggggcggcttatggctgatggagcctcttccaattagtccacttcgtggactgggatttgggctacaggggcaaggttggtggtgctgggatgagccctggttccggtactggagtgatggtacatattggggaagcggaatacgtgcgttatagaattgatagatctagaatttgaggttacttgagatccttgaagtcactgcatgtccacgaaataaattacatgatcgacagtttatgagacatataattatgatatctacccgtccattgtaacatcgtcatcctcttcgtcggtgtcagattcaatattcaaagtgggcaattcatcatcgctatcatcaactgcctcctctgtggcctgcgagatcagggtcgtagatgtggtggacacctgcgttgaaagcttcggggcctcagtcttgctgattgcaggagctggctgagagaaaggctgtgggttcgaggtgcttgggataattccgtcgaatcgcgccttcttggactgaacatcctgcgtctgtggtgttgactcctcagctgtgggttcttcggtataggtccgcttgtggaaagtaggcaccggagttgcagccttcgaatcgtccggcttcggtacttgcaagggcaccgacacaggttgcttcagaaattcggtagtctttggggcggcgttgtatgaatcatcagccatgtcctcatcttctgcttcttcgtcttcatcgacataggcgtcaagctcaggcgcagtcatcaggacaggcatcctgggacgaaccagagcctccacctccatctgatcagcataaggcctggtcaagaatggaatgatactcgagcctgccccacggcccttgactgccgggacagggttgagtacgctagcaaacatcgcatccttgtcggatgtcaaaataacggagcggtccatttcaacccggatggagggcggaacaagctcggcggggatagaaaggagcacggcctgcaaaagcccagatgcattctgctgaatttccaaaaacggagaggccgcttgtggctggcggaatttctgaatatcagggttcaaaaaggtatccgcattggctgtcccttgtccgccctttgactttgctttagagtcagagcccagatttcctgtagagctggaatcttcagtcgacgacagtatatcattgcagcatgagcgtaagacgtttgtcaaagacaccacgctctgtttcgtcatggcaggtccgttgaccggcaccatagagcgaagcaaagcatagactgctgaacgtaggtctctattgaacttttcgcctttaaaagtccacacagcttgctctagtatagtttgcgtgacggaggttgcgctggtcgccaatataccgacaacgttggaaagcaaacccatgcatgcaatgtgaatgcgaggcagctccatccaaagtgcctctcgctcgtcacggccaatttcctggttgaactgaatgccagaagatgcggcaccattgggtggaacagtaacagaagtgagtcgggaggttaaatcgagaatagagcccatcggaagggcaactgcagctgcagatggcattgagatgaaatcagagagaatctgcagaagcgcaatcaatctatccacgcccgagtgcagtccgctccagcctggaagtccaagaccatctgggcccccgtcacccatttcttggctatagtttggccgtgtgtgcaccagagtcgcatcgacagactcccactgctctacgacggctcggaaaacgtggtctgtcgttcggtggatagacaaaatagtcgacttgcaatcgtctttccatccagatcccgcctggtccttgggtgcgcacttgtggagagagacgagcagctgctcagctgcgtcgatcacatgctccggaaaatacgcaggcgaagaagagccaattacttcggcgagaagagttcggagctgggcattaaagggacggaagatggtgatatgtctcgggatcaattccagcaaggcgtgcaggacaatttccatgaatggggtgttgggcctcggctgtcggattgagcccgaaggagtcttcgtgatggtagagaccaagttcaaggcagcggtaacgaatcccggaagttgtggggttgtgatctcacggacaagtgttgggtactgataagtgaggtggaaaatacgagttagtgtgataatacacatctttctcgtagatatcggatcaggtttctagaaacgcattagtatagctaacataaataatggggtccaatttaattcatactgcgaggatgctgatcaagctgcgaacaataggctcatagccacgcaggatttcccattggccagcttcgactgtagcctttaccagaacaacggcggtccatcttccctcaacactgcggtcctgtaacagactcgctagtctagtcttcagtttatgaatttgaatagcattttcagagtccgatttgccagatttttgagtttgaggggtagagagcagctcagcgcaatcgttcaatgaagtcgccaggaacgaagctatcgagggtaattgctcgaccggagtagttgtcaggcgatgcgtgatggcgcgcaaagtagtagaagacatggcaactggaacagacctgtatcacaggacttgacttcaaaattagtccaattgatggaaaaatgagtgccgacgaaagatggaagtcttatcgataacttttttttccatcgaaaagctcggaccaccacgattaaattactgtcacgtacgtaatcgctccccacccctggacaatcatcaggcttcagtgaacgttgacgaccttgggacgttggcgaagcttgattgctattctccctttttgcatcattcacaactctcctaatcatggctgtaagtgttattcttgcgtctcattcaacgttttctggtttatatttcttctaaatcattgatacactcagtatttatgttgacatgcgcgaatcagggaggtaatgccgagaagggtcagggctacatcgcggccttggaccaggcgcggagccacggaaaatgggatgagctccccgaattgattcgaaaggtcacaaagcacgcatcgcagaggacttgtacgccaccggcccttggtttttttatctcagcctaaccgggctgtctctaggcctgatacagaccgcaacggcagaatcgcgtgtgattgcgtatcttcaacaaaagtcctccggcgactcatcctcttcctcaccgaatctggtcgagctgatccccgctctattgatgacaattgagaataatgacgggtccccacaagaattattgcaagcgcaggtgtgtctagggtggatacactgggtattggatgagcctgcacttgcggcagcgcgtctccctaaggatttcgcgggaatactcgatagcttggctggtggaggcgagcaacccacgtcgtggacggaggtctgtttagtgaagggatgctgcatcaagggtatgtttacttttacttccggatgtagccagttattaatctgacagcaaaccagcaaccgcacaatctgttgctggagacattcatgagtcattggagacatctgtctctctggttccatggctaagcggcggcaaattgacctcaatcaccaccccgcaattcctgaactggtccgagtcacttctgggtaatggtgctcttttggctagtgatgaagtgactaaacatgcgccctattcggatcataggcatgcagatattgccttgcaattgctcaggtcatgggcggctcatcctgtcgtgaaacagggagtctctgctaacagcccatcgaatgtggatgacttcgcctcggctcctcgggcatcggtatggactgcttattataggttcctcacagcagtcctacagggtgggcttacatataccggccccaatgatgggccggaccgcccgcaactttgcaatgaattgcgtcgcgtagagactatctacgaacgcaatcttctctctgaggtcacatttcctacggccagcacccaaaactcgcaagtcgaggaatgggtggagcaggtaattagtaactggcaagtcttgtgtggtcccgagtggcaggattcggatgtcggcgaaggaggccagaatgcagttggtcgtaatgtgttagaggtgagtctaacaacagatctcatcaaaccatatgtactaaacacgtgttgtcctagattctgtaccgggcagcaacaaggacctaccactctcatttggtactccgacgtctctttcatgttcattctgctttggcagactttgacttcgctgtgaaggcgctcgaatcctatattgagattgtcactgcagccaaagaaagagcagagaagtctgctgagtccggccagctggaagatgatgaagtattgctacagacgctctctgaaggtgtcacattattgagctgccttggctcgctggaagaggcagagaaggcccgagatctgactgaacttataagagagtatatcgacaagcacaacacgcctcccacaaacggtcttgtcaatggcaattctaccaacttgccaaatatccccccctccgtgttggcctcctcctaccgagccattggtgttggacttgcctgctgggcaagctggactcctgtgaatgaatcacgcgatgaaattagagctgatgcgatcgaatacctggaaaagagtcttgctccagagttgggatgtagctccaattattcctcactttacaccctaggccttgtcttggccgagagcagagacttggacactgcaattgactatgtcaagtcagctctgacaccaagcagctcatctactgccgtatctgatgatctttccaaagaacgtgacttggtatcgttgtggcatctgcttgccctgctgctgagtgcaaaacaagagttcgagattgctgggcgttcatgtgaggctgcattcgagcagtttcccaaagagttgttctcgaagggtcgcgaacggcgttcatcaaagaaccccaaccagcgccccattgtcagcagattgcaaggtagagaaaaagaacgcatcgtccaaactcgcattacccagcttgcatttatcgagctcctggaaggacctgaagctgctgtcaaccacagcacacaattattgagtctttttggcactctttttaaggatctggacctcgaggctggggagaacaaatccaaggcagaccacttagtgccaccaaagagctctgccggaactatcaggagcttccgtggaagcattttcggccgaaatagaacgagccagttgccagatcgccgtgctgatcagagtagtggttctgattccgccattccgcccaccccagctattcccaacggtcatatgacggatgccccgtcaatccaagtcacggacgaagatcctcacagtcgtcagccaacggtcgggagggcagactctaagaaactgaaaaagcgaactttaagctttcataaaaacgagagaccgcgcgttgaagagcctccacttcctattgagggtgaaacatctgcagacatggtcggcattgcattttctggcaacacatcaacagagtccgcgatccgtcctaacaaaggcaaacagccattgccggcgatggcacacaacatgaactataaacaagagcctctccctatcggccatgaggaacaaccccctaagcaggatgtccggctcccaatcggctaccgtttcgattctcccacaagcgccgttatgaagtatcctctagttcaatcccagaagcacgccttaggtcttctcgtcaaaatctggcttgttatcgcgggtctttatcgccgagcttccctgttcgaagatgcccgcgagtcgtgtcaagaagcttcgaaacaagccgcgcgagtggaagcactcgttgcatcagaagaatgctccgctcgatcttttagcaagcgcggctggggtgcctccaagagctctgaggagctttgggctgatgtttacgcggagcaaggtcttttgtcccaagctcgatcgaggccccatgaagccattaggcactttgaggaagcgctgctgcgctaccaagaccacccaacggcgactattggacttgccaatcttctcttggacatttgggaccagaaattaaccccagagccagcgaatgccgacgtggatcttaacgtcgcacgtctgtcattgctggcggagacccccagccccaagtctgcgcaggccatctcgaccgacgatctcaaggtatcaagcgagaccgataatgcgggtcacgaagaagtttctttatccgcacaagatgtcgagcctaagcaactgcaccgtctcgcggcccgcgatcgcgcctatgggcttctttctgcgttgacaaagctcggaagctcctgggacaactctgaggcatggtatgcgttgtcgagagtgtacgaggctggtgagcaggtcgaaaagctgaaagaagttctttggtggtgcattgaactggaggatcgaaggccaattcggcactggtccaatatcggctccggtgtctatgtcctataataaaggtaacaaaatcctgtatcttcctgtatctacttcattttggatatcctagacccttgttacatgtcacgtatagtcctactaattgtaaagggtaaaaacctggcacgtaccgcaatagccagatcaattgggcaggacgttataaagcaacgttctaccaaaaagagcaccatgtcaacccttatgttgacatgccaggttaccaattcataaccccactatttgagatgcctagtcactgtcgaagtcacattccaagtaaggttatgagggtgactagaattgcgcctggcaatatgaaccataataatgaagtcaaaggtagcatacttggtcgccgttactattggcaaaaaaacgtctttatatacatctccgcaaacgacaatgagttgtcaatgggttaaaagggaaaacaagatcagttgaacggcaagaaaagtggattgattctgctattgcaagtaaatctaccgcggagcagcaacgggagtccaggcggcgatcttgggccgggtgctagagtgacgttagtcgatacacgggaacgacagcaatatcgcacataggaaaattacacgtacgtggaataagtcttgaatgcagcgcggctctgggtcgggttggggcggggctcagcgagctcccatggacggagaccggactgcatgatcttgtcggcgtgcgggggcgcgtcaacgagataggagatccaggcgtgccttaataaggtcagttccacatcatcgcaggtacatcattgacccagtgtctcgagagaagcgcttaccagccaggctggatctgggatgcgtcgaattcggcgtccttgtagtcgatccaccgtgttcggactaagcggagaagtaccattagaacttcatgtttgaatgtgatagtatgaactgaagagtcttcttacgaggcaattcctccaggttctcgaagtatttgtttccgtagcggtcgactccgatcagagttccggccttggtatcacctgtagaacgtgtaatgttagtcaactgctgggcagatatcgatagggtggaaacgtaccaatgttctataccacagcgaacaagggcataggttagtctcgagctcattcaattgatctgctgttccgggggaggcgttcgtaacctacctgcatctggtgggcggcatcctgtacaagtgtgttaggaaacgagtttctatagggtatagatcgcaattatacgaaccttgaagccgactcggcggagattgcgcagcgtcctcacaatagtcgacatctttgctggtgtattgtgctagagcgaatgggatgcgagagattggcgatttgaggttgcaggagggcggtgtgtttgcactgtttgcaccctgctctaccatggatatcccgattcagaaaaccctcgatcttgaatattcagacatgttcggtcgcattaaagggcagacgctttgttgtgctgggcgtcgcccagccgcacgtcggagactgtgtgctcgccaattttctgcgcatgctggtacaggagctccgactgcagcatctgctccttcacctctagcaggaatcaccgcggagctagaccgcattgctccccgattcgaggtgcctgcgtctcagattcatattattgactccccggcccatttctactctacattgaaggtatcttctgttctgtttgtctcctcgatataatttggaactaactggctgttctgcagaataaaattcgcaatgcccggcggcgcatttacctctcgaccttgtacatcggcaagacagaacacgatcttattgacaccttgagccaggctctccgcggtaatccagatctcaaagtttctattctcaccgacgctctgcgcggcacgcgggagacaccgaatccttcatgcgcttcactcctttgttcgctggttgaagagttcggacctgaacgagtcgagattcggatgttccatactcccaatttgacgggtctgagaaaaaaatggatccctcgccgcatcaacgaaggctggggcttgcagcacatgaagctatacgggatagacgacgagatcattctatcggggtatgttatctgcgaactggtacaaacatggagtactaatatatttgcagagcaaacctatccgacgaatacttcacccaccgcctagaccgataccatgtgttcgactccaaggtgctgactgaatattacgctcgcatccaccatgcaatctgcagtctgagcttccaggtgctgccggaccctcaagacaaatccggctatattttggactggcctgccacaaacaaacccccttctccgcttgatgatcctcagcagtttatcgcatattcttcgaccttcttaagcccgctcattcaggctcctgccaacaaacctgcgcttccctcctcgtcaagtcaaacatatgtataccctgtatcgcagtttacttctctcctgcaacccgatgacacatctaccgaataccctgccgtgacgaccattctccatcttctgtcaagctcatcagtctatgccggggcccgctggctcttcacagcaggctacttcaacatgcaccccgtcctttcctccctcctaatttccagtactaccaccgcctcgaagactcctaccaccacgaaaggtaccgttttgacggcctcaccgtgggcaaatggattctttggctcctctggaatctcgggaatgttaccagccgcatacacacatctctccgcccgcttccttgatcgcgtcgccgaggcaggtgcgaccgactccattcaactgaaggagtggcgcaagggcactgttggcacgccaggcggatggacctaccatgccaaaggtctgtggattacactgccgcgtgaggaacaccccagcctcaccttcgtcggtagcagcaactacaccaagcgcagctacagcctagaccttgagtctggtgcggtggtcgtgacgaacgatccgggtcttatgcagaaactgggtgaagagactgaacggctccagaaagatgcctcccctgtctcgagagatgacttgatgcgaacggaaaggcgagtcggatggaatgtgagactttccatgtggattgtagagaaggttggcggtgccttctaattctcttcttggtcttttgtataaatatctcttgagaataatagcgagtctgtaatatactgatggttgaggctatcagaccatctgagtcacccactatggatccaccatttctattcgattacaccaaaatcacgcagaaggacccagaatgaccactctgaaataccccatgtctatccaaggaattatcctctcaaaattctggttcggcttcgatctagatgacacgctccacgaattccgacgggcctctgccaatgcctcggtccgcgtcttcgaaacgattcacgcctcaaacaacaagaccagcgttgatactctcaagaatacataccaagatatcctgcgcaatacaaccgcaaacgccttcacagatgggaggacttcaagcgagtatcggcgcgaacggttcgggcgtcttctccagacgcacgggctcactgatgactctttcctgagtcgtctgttagaggtatatcgagactctctacgcgaaaacttgactctcaagccgggtggattgcatcttttgcaaactttgcgagaactgggaaagaaaatcattgtcattactgcaggagtggacagtccaggagctcgggatacggccttacattgatgtgcttgtgacgacgaacgaggtcgggaagtctaagattgatgggctgtttggtgccgtgctggagaaatatggtatcgccgctgaagatattgtatacttcggtgataatgcgattcgcgatgttcaggctgcgcggcaggaagggatcctggctgttctttatgatgaaaagcagcagtctcgtttctacgatatcagtgcattacgagtggattcgtgggctattgtagaaaaagtactcgtccatggagacatatagagcatcgagacataaacataacttttgctctagccatcaagagatatcaaccctaacgcacaggaatgccgtaataaaataaataataaaaaccaaacgccatgtcatgactgggagctcccgtcgtctcatatgcagtgtaaatcttcatctaagcttttcccgaaaccttgcctttcacgccttggagtcgagctgggccgagaccggatcgcacttcgtcgagcattctgataccaatggcctcgttaccgttcctgccacgcttgtgcttggcgccgtgtcgcttcgcctgtccactggtattggggtcccagctggagaggaagtcgtccatgacgttgttgaaggtgctgctgctgtgcacggcttcgccgttaccatcgatcagactaggggctatggatgatgtggtggacatgcccgtcatgcccgtcatgccggttgcacctgtcatgccgctgatcatggacatgctgtcatcaaattcgtcctcctcgtcgagagcgtagagctgctcaaccttgtcaaatcggtcgtcaaggagacggtggccggcagtacgagccagagcggacgaagtcatggagtacgcagacgggttggtcagagcacccttgcgcttcttccggcgaattggcgttccgccaacagtgaaggtggtcgacgccatcgtctgcgatgctgcgattgtaggtgcagctggtgtgggagcattgccagccttggcatcttttttgaacttggcgaactcgctcatccaactctggtcagtgggctgcatatcgggagccggcttatcaggctcgggcatctcgcctgcatccattggtggctttacagattcttctggcagttcattttccattgagcgatgagcctcggtgctgtccggttgcacgggcgctttctccgtagcatccgactcccatccctcatcatcgacttcgtcgtcgaacagggaatcctcccagtcgccctcatccatttcctccgcattagctgttaattctccaaagattccgtcagcgtcgccatcctcgacgaaggcttcgtcctccagagcctccagcgcctctcgcagccgcgggtccatgtcaggcttgaatccagcaattgcatctgggacgttctgctgatcctggtaggttggcttgcggataaaggatgaagtggtcgagcgcatatcgccatattgtgagccataaagactgggaccaacggaggcgcccgaaccataggtatctttatccacgagcgagacctgccgcagcgcatcttccagcttcatccctcggccagccctacccttagccttctcattcttggcttcgacaaagtatgcatctccgctgccgcttcccagctcgcggagatgctgcatgtaatcgtagctggagtcatcgtaatagacgccgtagttggcagcctcgccctcatttttgcgggcactatcgccgtattcggactggaggtcagacaaatttggcaatgtcttcttcgaggtgttcgatgagggcgcaggcgcggggcctccgacctggtacaggaaacggtcctccgcactggtatcgtggatcaacgggtcattttgagaccggtgaaagagctggaacttgctcgcgttcttcttgtcactaggggcatgtcagctttgacgccataatcatccttatgcgatacgtacatccactgtttgggcggcatctttgctttggtcaaatttttgatatcgcagaaaaaagggaaaaagtgggattgatagggtcacgtgtagcttatcgcccctcgttctccggggtcctcagaatctgaactgtcggagtagttagtagtatacgatgtttaggggggggggtggttcttttccagttccactctattcgtttaattttgatttgactcattgtgcaacttcgcttggaggcttgggtattcattgggctcggcgcttcaaggcccgcatcaatagtatacatattgaaccagaagccctagttatagactatattggtcctcagatatggcttcaactattttctgctcctatatttaccatatacaactaaaataaccataaaaacctgcaaaaagtacaaaacatggccatatacttccttacctggatggccatcccgccatagaggggcttagtcagcgttatcttatccgtctgaataatccaaaattcccttttcaggtgggggttgtgtctcgacttaattttttacttcctacaacttttctcgattttagggaatcgaaagccatcgccatcatggttttacctaaatctaagaaatccgtgggactgggttccagtctcatgaacgatcggttcggaaagggcaaagcatcggctcaaaagaaggtctctcacaacaatgccatccagcgcacaggtgtcaatggtgaaacctacgtcaccaacgaggcgaaggaggcatcgtgggtcaagatgcgcagtatcactgagcaggcagcgctcgacgaattcctgagtaccgccgaactagctggaaccgactttaccgctgaaaaaatcaacaacgtcaagatcatccactccgatcagaagaaccccttccttctcacccccacagaagagaggaaagctttcctgaagcaccagaagaataaagaccgcctgactgttccccgacgacccaagtgggaccagtccacgactcgaaatgaactagaaacgatggagaaacaaagtctgttggactggagacgaggactggctgagctgattgagaaccatgatctgctgatgactccattcgagcgcaatttggaggtctggcgccagttgtggcgtgttattgagcggtccgatcttattgtgcagattgtcgatgcgcgaaacccgttgcagttccgttcggaggatctggagagttatgtcaaggaaatcgatccccgaaagcagaatttgctgttggttaacaaggcggatatgttgagtctgaagcaaagagaagcttgggctgcgtactttgagaagcacaagattaacttccgtttcttctctgctcatctcgctaaagagaagaacgaggccctcgctttgcaagagaaagaacttgattccgatgatgaactcgcccagtcggcgcaacatatcgacatacactccaatgaagatgatggataccagaaggaggatacagtggaggaagaaagggctaagcttgccgaccctgagcgctcgcttgggccacacattctggacactgacgaactggaagagcttttcctggccaactccccagaatcactaccacaagatgacgagtctagcgagcccaagcgtaagactacaatcggtctggtcggttaccctaatgtgggtaaatccagtaccatcaacgcccttctcggtgcgaagaaggtttctgtctctgccacacccggtaagaccaagcatttccagactctctacctttcgccggagattatgctgtgcgattgtcccggtctcgtgttccccaacttcgccaccactaaggccgagttggtcgttaatggtgtgctgcccatcgaccagcagcgcgagttcaccggtcccgccggtattgtcgccaagcgtatccccaagcatttcattgagcaggtttacggtgtgaagctcagaatgcgtcccatcgaagaaggcggcactggcgtccccactgccagcgagattctgcgtgcctatgctcgcgcccgcggtttctccacccagggtattggtcagcccgacgagtcccgcgctgcacgatacgtcctcaaggactatgtcaacggcaagcttctctgggtcaaccctccaccagttggcgaggacgaaactccaattgacagcgtcgacttcaacagcgacctatacgacgtcgcccatcttcctgagagacgccgagctcagctcacacaagccaagattggaaagcataccgcagtagaagaggtcaccgcggagcccaccggcgacgtcgactcggaaatccccattgaagtagccaagatttccgtcgagccagagctcggtcgcacctcccgcaaccttgatacaggctttttcggctcagaaaccggcccctctgccggccgtctgacgctccccttccaggcccggtacacccaacagggccaggagatgcgcaaggtgccaacaggccgcaaagagcgcatgatggttgctcttgagcgtggcgtggatgtctccgaagtgaaaggcaacaccggcacgaagaagcacttcaaggcaaacaagcgcctggccaagggcaagcgcaacaaccctgcggatgacgactactaaaaagtgattttcttttatatttcctttgcattgttgcttgcgctcgcaggcgagtcgagggagatcggagctctccctctgctctacgaggtatcattcttgggcttattggggcttgaggtggatgaattgataaatggtcccacatatgggatttgcatgtcatgtcgggattgacggtttatgtccatgtacatgttcatgtttgttgaggaatcatctttttggcgttcggttttacgagttgaataacgatttataccagtcattcattcacttgatcattgtcactttccttccatctaagactatcaagtccaacgtaaaaccaagtaaaaccggagcaatgttcgtgcattcttattccaaccgaactagccctacatgtaaactatatctccccattaactcaaagatggctcttaggcttgaacccagaagcaacaagcaagcgatccgcctccgcccgctgccaattcaacttggcaataaccgcatccttgcgagtcttgttctcccgcttacccagctgctgcaagtggacctcatccggaccatccgcaatgcgcagcgtacgaatcatagcccacatatacgcaagcggggtatcctggcaaataccagctgcaccataagcctgcaccgcgcgatcgatgatagtaagcgcagtctgaggaacaagcaccttggcctgagcaatctccttgagcgcgcccttggcattaccctgatcgatcttgatagcagcgttcaagaccacgaagcgggcggcatcgacctcaatgcgcgacttggcaatccactcgaggatcacgccgtgcgcgactagaggcttgccgaaggtcatcttgcgctcgtcgttgacgcgggcaatcagccactcgagcgcgcgctcggcggcgccaatcgaccgcatcgcgtggtggatgcggccgggtcccaggcggccctggatgatctcgaagccgcggccttcgccgaggaccatgtttgaggctggcacgcgcacgtctttgaatgagatgtggccgtggccgtggggtgcgtcgtcgtacccgtatactgtcaacatgcggtgcactgtgatgccggggagtccggcggggacgaggatgacggactgctgcttgtaggtgtctgggttggaggcgtcggtcttgcccattacgaggtagattgcgcagcggggatcgccggcgccggaggaccaccatttctgtattggctgttagatgttgaggatgagaaggggattgtagaggtacacaccgagccattaaggacgtactcgttgccctcacggcgaatgtcaagctcgatatttgtcgcatcgctagaggcaacttccggctcggtcattaggaaagcagagcggatcttgccctctaacagaggctcaagccactgcttcttttgtgcgtcgttaccatacttggcgaacacctccatgttgccggtatctggggcagcattgttggtagcctgataagaagcaatagtcagcgatcaatcgtatcaatttgcaagacctgcccagcaagtaaagcaatgcgccagacaaaatagaataactcacctccgaggcaattttgcttttgccgagcaactcggccatcaatccatactccaagtttgagaatccagcgccctggctgaagtggttcttaggcaggaacatgttccacagcccgatcttcttggccttctccttcagggactccaagatggcggggttggtcttccatcgctgctccccctcgccaagctgggctgagaagacgatatcggcagggatgcaatctttttcgacgaattcttcgacctggagtcatgttagcgctgaatattggtgatttgcggatattggaaataaattaccagatcgagggtccgcttggcctgttcgctgacgaacggctgggcaatgggcggaatacgagaagaagcggacattttggatataagaatgattgaattgatgcagaatataagcagaatcaacggatccggggaatataagggaaatataaagagaacgaggtcagcccatccaaaattgcggagaaggtggagaagccgagtccaagtgcctcggctcagctcctaaccggacgacttggagattcttgatatctcacgacgtcaaggtaaatcggccagatctccgagattacttgtacagaagtctatttggaactatgtatatggatcagaacattagtattcaatcattgttcaatattatgatatggcaagtaggtctagttaacaagttaacaacggagtacagccgagatatcaataagaaaagaacagacaactgccattcaacaggagaaataaaggggaaatcaaagattcaagccagctataagccaaaaagatatctcttagctacccctgcttctgcagttctttcccgaaatggcagtccattcaacatcccgaggtctgtaggaaatcgactaagccctgacactgtattgttagcagcctgaattacacattctacacatatgcatatagccatgtcacaaccaagaaaagattgcgttgattccaatgtgctccatgagatatcccaattacagttccatccatccatcccataccccgtacacacaaaaaaaagagcaaaagcaaaaggcattgcaggtcatcacacaaaagaaaagaaaagaagaagaacatatagaagaacaataaatcctaacccagacctgctcatatccaagatctcgaatctgcctttcctcaatgcatccgacacagcgaccggcgccgagtaaaagcgattgaaggaaaagaccatagaagcagagtctggggggaaagaaaagagaaagaagaaaaggaaaagaagatcgaagtgaaacacctcaaaagacccgcatctagttctcaaggcccttctcggctgaagattgctcgtagctcttcttgccgagcttggcgaacaacgattggggcttgccggcactgcagttgagtaggttagcttggattcgattcagagtctatgtgggaaaaggaaatcacatacttcttgaaccgcttgcccttgatatcgctcaatttctttgtgcaggggctcatgatgtcgtctgagggtgagacgtaggaggttggttgtctgttatggaaggttagttcgttgcagaaaagaataataggatattttatatgggagtactcactcctcgcctgttacttttccctgcaatacctggcggtggtgctccattgatgagatgtctgagcccttcaggtcggtcttgtcgctcgcgttgctcaggtgagtgttggttgagcggtcggccaggggctgagcttgtgtggttgcgtccattttgtgggtgtgtagggatttgaatgggttaaagggaggtgtagataggcagtgatgtgtattgcgtggaggattgcgtagttaaaagggaagaaggttgacaaaaacaactcggataaggtgaaaatcgtgtgttgggtgggcttcgattgttgtccgggcaactgagtatgacgccacaacatattccctcaaccttggataattgttactgttatacaggcttgtatttatggatatctaggttttcattcaaagaatgcagataactctaataacagtcacagtaggaaacaaaatagtaaacacagaaagtgggaatcattggtcgtccaaacatacacgtaatagggtacatagaacagtgtacagatgcagaacgctagtggataaagatcagaatgcaaggtcataaagtatggctaaagccattataccatgaaaggaagtatcacagctcaggtgactgtggagtatcggtaacccgggcgacatcgtccggtgtagtcatgtccaggtcatcaggccgcccattcagtacaggcggtgtactctgagaacggggttgtggtgtccccagagtaggcacagacatagacttgggagagacgggttcttccaccctgtctgtctccccgacatctcgttctggagaagaagaagacgtaggagtcggcggggaataagcagcggtcggactagtagcgctatcttgggacgagtcggagaggtttctgcgatggccaccgttctcacggtatgaggacgaagtcgggcgtgtcgaccccgggctagccgatggtgtggcgaaaattggagatgaagaccgcagactgtaggaccgagcgaccattctttgaacggcagggaattccatatagttgcttcccgacccccgtgagaacagggcgagggcaaagcagcagaggaccatgatgctctggatcacggtgactctcttttggaaaacgagctcgtctgcaagaacaccgagctggccgctgagggagtggacttcttggtggtactgaatgcgctggtgctcgaattcaagagcaacagacttccagacgtggtcgtactgctcgcggaattctctcaattcgttgagaacagtgacgttgagactttcaaggaaggtagatgtcttcgctagctgccgcttctcaaccttgttgaacgcatcgcgcaagatgcgagattgttcctcgatatagagaagagacagggttgagttcgactcgagcatctggagccgcttgtggacggacttgaagaaggattcttgggtcgtgggatttgcagatggcggttgagtgttggtaggtcttgtcgattctggaagagggctgttctgctcctcttttgggttggtagtaggtttccctgcggtctcggatgtggcgttctgctgagcaggctcgaaagatacgcttgaggcatccggagcggccacgacacttttggcaggctcgccctgttttcggatatcctcagcttttgaaggggcgggtggtgcgacattggtcgcggagggactacctccaactgcagcagtagagttctgtttcggtggtggattggtctgatccgttgtggctgacgacgatggagtcggaaaaagcggtccatcatcaatgctgcatgtatctccatcattatgcgtcgcaaaaggcgagacagcctctgatggagggtttggacaaatctcctccactgtaaggctaggttggctaggttccaccgcaggaatagattcctcgactggcatttccacaggcttgatctccaggtcttcgggaacctgaatagcttcactggcctccaactcctcaacctcaacgtgatcagagctctcgccatgcttgtactcttccatcatggtcgtaccatgcacccgaatcaagctgacggggcagaagaactcatgcccatagtgcgtgaggaactcaattctcagatatcgagcccaaataagcgagttctctactgcgaaggcttgcacctcacgagtgttgcgtgcctcatacaccccgagttctttccactggtctggtttcgcgggataccgatcggagacactaacccggaacgtgtggaagatggagctgaagaactcatagtttgcaaggacaaccgtatcaaccagaatatcatcacacatttccagaacaagaaatttgttctgcgcgcgacactcattgagcatatagctatccttattctcaatgagcacagaagaagaacccttgctttcaggattcgtcttcaagaccgtagctgcgcagtcaaaggaagcatagttgaaccgctctttgcaagtagtgcccgcatccttacgacgcgacgcatctctctggagcgcaccctgcccttgcacatccacattgcctctgccatccgcattccccgactgcccagcctcgcgagacgggatatgcgagccccaagcggtaggactagcctcgggcgtctcagcgccgaacccaccaaagtccaactcgatctcggcatcgtcgcccagcgaatccaaagcattattgattccagtcggctgccgacgatcttccttcccagcagccgcagcgcgtctgctccctccaacattctcggctgattgtccgaccttcgctaggttctgcttcttccagtcctcaaaagagaggaaattaccaccgtctaatagcgagtccgtatcttggtcctgttcggcgctctggtcggcgatcgttttcgctctctctcctggcgtcccgctcgggattataggtggattcacgaccggctcgttggctgtcgcatttgtatcgggcgccgaggcaaggtagatatcgcgacccggcccccagcgcgtctccagacacggcggcagatggaagagctcggactcggtctgccaggtactcttcgctggacatgtcgctggtgttgtgtggtgagcagtttgcgccccgttcgggggtggctgggcggtcgcattggagagcgcgctgtggcagagagccaaaatgatcgaggcgcggtatatccaaaaggtcaatgagggtcttgtggtcaacatgctgtcgatttggtgatcagatactcgcatgtataactccctcggtgagttcaagctatgaattcgacctgcttgctatgcgcatcgtggctgggagtaaaggagtcggcacgggaatttctcctaagtggtatttcgctatacgtgggggaggttgcgattaagcaaaccctagcttggcgacaagtggcggtctccagaaagaaatggatcgtctggtataaatggcaggtgatagtggaccggtggcatctcggccacgcgctgggcctgaccgcctttcaactcggtgagagcttcagggctgcaacgttcaggattcaatatacaacttagttagactacaactacaactacagactcatcatctatgaattacagagaatcatattcttcgtggataatgtttgattttccctttggactgttccacgaaactagttacagtataacacaatcaagagaaaacggccacggtattccaccacgtaggcaaatcgacttcaccgcaactcattccacctttccctgaagcaaccacgtcaatcgtgtagttcgtatgaaagcctctcgccagaattaaatatccaccagcgcgttccgagccagccttctaaccttttgtagttgtgtatccgtcgtctccgccagtgtccttgatcctcggtctgatattgtacaggaagaagaaaaaaaaacagtgtggacgaccagggaggatgatacaatgcacgtggcaatgcaccgttggggacggacggaaacagacgaaacacccaatccgagaacaaagagacataagacagaaagcggaagtttattttatcgtgggcatttttgaactttttttcccaactgaatcgaaacatgcaagcagacatcaaaatgaggggagagtatagggtaagggtgagtgaagttcgagtgaatgtcgacaaccctagaagtgagtctcatgccaaccaccgacaagatcgagatcatcgtcaacgcttccatcaagaggaaggaagctgctggggacatggctacgccaatcctgctgttcgagcaaatggcggcggcgaacctcgacaggcgatgcgggcttggacttgccctggtggtatccggaagtacctcgaccccaatcgtgtcgccgagtattggcagcaacactcttggggccaaacacctcacgcgacttgcggggcttacacttgtgcagttcgtcctcgggcttgtactggcgtcggacttcaccgagcatggaccacttatcggcccgagacggctcgtgtggggagctccgcatggggcggggcgtgctactcgacgcactggagtcgctgtcttcgtccaaggaaagatcccccaatacatggggttccatcttcagatccacatctgggccgtgagagcgatggttgggggaagcggaggccggctcgcgcaatcttgggagggcagctccctggctctcttggctccagctgcgagagttctgctcccgtcgttgagccacagcaagatcctcattctcagactcttcttcgtcccacatgtcgcaccaactctttgagatcttgtcggcacctttgttaccaaagaccatcgacaaggaagggagcggcttcgtcgtgtgagacggcagtgatccagtgatggaaaccggatcagagcgaggaagagacgggcccgcacgcttgcggagatcatcacgcttacgaagattgagcaagacaaaggattcactgagctgggagtccaaaacagaagccactgaaggggattccatgcgagacgagaaccacgaggttcctgcagcttcggaagctgggaacagatcctcggtgtagctctcgttgtccggaatggcagagagttgtcggatagcctggggaggggtcgactggagcgccttggcccatgggaaagcatctccctggttgacatatgggctctggagagatggggtgcgaagtggttcgcggttggcgctggcaggaaccacctcgcggtcctcggtgcaaaactcgtcaagagattcgtcgtcggtagtgaacgagaccgcgcggaggatgctatcacgcacatccagcaaagaccgcttggagggatcaatggtcaaggcatgagtcagaatctcgtacgtgtcctgcgacatgttggggaagatatcgaaaagcgactggcgatcccgcacatagtcggcaaagagtacatcggactcagtgggggtaacgaatggattccgagcaaacagaatgttcaacaggcagatacccacggaccagatgtcggccttggcgggggagtatcctgtcgtggtcggctcatattgctcgggggccatgtagcggtcactgccaacacacgcctcgtaacaccacgagtctttcgtagcgagaccgaagtcgcctagcttcatggaaccgtcctgtgtcaggaagatattctccggcttgatgtcacggtgatacaagccattggcatgcatgaagtcgacggcactaattagctgcagcatgaaatcgcggacgtgctcggtctccagtggaccacggttaaggcggatggcctcgtataaatccccattggcacagtactccaaaacaagatatgtatgagtgtcggtgttgaacgtatgaatcaagttgaccaaattcgggtggaacccgaatcgtcggtgacactcgagttcttcgaagccggaattcgttgaggccttgatgagacgtttgatagcaacatcctgaccggtcttggtatctgtagccaggaataccattccaaaagacccatggttgagtggggccacggttcggaaacgaccatccaaaagttggccttcaacgaactcttccttcaagcactccatggtcgacatgttggcctgatgatccaaaaaaggacgaatgcagagatgagatgaaaagggggagcggactgatgtaatgctccaacaaagagatgaagtgaaaacaggtctatgaaccgctcaaagaacacttacgcttgtgaagaatgcgtcgaagtgtgataaacaaaaagcaaccaggctaatgaatattaaaaaacaaggagaagaggtatcaggctcgggatccgaaggtaaatagagggcgagaaaagccgggtgtcaggaggttgagatgaaagggaatcctgacaggagatgtcatataaaaaaaatgtactggtgaagttgatagacagatgaaaagaggagagaatggaggcgcagaggcgtagttgaacccagggggttgttgatgctaaggaaattggtaaagaccgttatgtgctcatttgtatgtcgtttttcgttggttaacgggaaggggtcccaggtggacgacacgaatgtgtcaagaaatggacaagtggttggaaagtcggcctgataccggatgaagcgaagagagtcgagttaaagcgctgcgtaatatcgtaactgaaaaaggtcaaagatgtatagggagaatcctgtgaacaccgggttcaaggtcgaggccgtgactcaagttgaagaagataaataattgagattagtgagtcatgaggccaggtagtaatgttggggcaaattggttgggcgaattgagggatccggtagagtacccttctaatccgagttggaaaagcagagatactctatgccaggttgcccctgaggtatgaaacttcgggagtgctctcggaccaggctcaaccgaagaaacgtatgattgaccacaacgcagcggacaccttcgtgtggattggagtgacgaaggctggaggtatcgatagcaaaattgaatccgacagaccgggatgaggacacttttatcaagttgaagaaagtgagtcacccgagctcagggtggacccggaagacggaggaaaaggggtttaggacgggagaggtcgagagtagtactctgtcaaaggtagatctgaatccggccttcgaggcttgaagctgtataagagtacaatcgtccggggttggcaatgtcttgatatagatggcaagcagacacggcaatcttgggaaccttgggagcgttggaagtaataggaaggtgacggagaagtgatgcgggagagatgattcggacaggtaggaaaggcggaaggagagatggggatctaggagagcgaaaagaagatgatcgggaacgagatgttgatggtataaggggagagagagaaggagccagggagagttgagaggtgttgtaaaggcgtgaggggaattggagaggccatgtgattggctgtacggtgtaatacggtaagataccagtctcccctcgtggacggtccatccgtgcgatctgcgttacccaccgactttggccggcacctgcaggtcctggggccgtttccgtctcccggggaaactggtcacgtattgaaataataccggtattgacaacggggggtccgtctaggctctccaagtttcatgaaccttccaggcattccttatccttggaaagacgtcaaacgtctacgtgatcgacttcattgtcgaatgttggaatcggggtctacgataacgcgataacgtttaaattccattgttggttgcctctatcacatcatccagccctatctttcagatttcagacttccaactctctggccttcagactttcgatcctaaactctcgagactcggggtcggccacaagccagtcacaatgacgggcgacatcagcaggggcagccctttgtcttggagctcttggagtctcgtcggccgagggcggatcaaggtggcgcgctactcccaaagcgtataattgcgcagccaattcttggcagatcagccaatcagaatacatgatccggccactatttacaagctgcatgacgcgatagagtgggatggcgtgatctcctctgattggaccaccccggatacctactgccagctctcttccaaggccggtgcctatgggaaggtacgaaggtacccttccgcaggtactcatgcacggcgggcctggtttcggagtggaccaggacaaagaccagggtttggcttctcgattctcccagttacaccactcgctgcactattaacgttattctttgccgcgcgggatattatgagacaagattcgtctgacccatattattgacccccccgatatggttgcggggttctaccaatacgctatctctaactatatcagcgggtaaccatatcgatgatcaccagagttgagggagtatggagtatgttggatcggacccagttattgatgtgtccgtctccagtagtaaatggggggttggagaacatctcaacccaagaactactccgtacaaagtacaagacacgtatgttgtacttcgtgtggagcgtgctcccaactgtcatgattcccaaccacctttcagacacccacgcagccctgtcaagcggtgaagggaatgctttcgctgccaggtggtctggccttggatcaggtttgaccgcttcctgcggcctgcaaggccaaaccttgcaggtctcgaggtgataggtacgatgtacggaatatacctttggattcaaagcatgctcagaagtaccagtacgtggacgcttgaaacgatagagttgtgtggctatgtggcacgacttcggtttccggcaactcctgtgcatcacgcgacgtcccatccattttgcgtctcatcaccccatttgattcattctcggagatcgcaaccctcccaattgaattcctgggctgtgcatcggatatggacataaccagctcgtttcggtacattatctacgaatgcattgtacctagcatattacatcgctccgatatagttgtacacaagatactactttgaatccattgcagtgagatctgcaggaagtaaagtgcacggctcagtatctggtcctgatctccccctccatcacacatcagccattgccgttgggtccgtgattacattctcgttctctgttatgcagtctctcgccgagtataacatatacgtcaataacgtccgtacacgatctgctgcatcagtacatataaaaccccctctaagcattcgtcatctacggagtgttgcatcaaaggaaatcgatcagcctatgacagtcgaccccaacgataaattatatacaaccgccctatcagcccctagcgatgaattgaaacgtgtctcttacacttaatacttgggcgcctgcatggttttagccacgtacatgactccatattgactaccatgataccgagggggctggagttatcttccgaatgtggtatttttgatatgagatgtgatatgagatacgggttagttacctatcagttcgaaggttctacaagttacggagtagactcccggcgctgggggaagtatcctccgatagggacgataagagtccccagacccgaggcagaagagacaaccttgggcgtaaacaaataaataggatatctacggtttgaatgaatcatcattatcagagacgacggtatcactaccataccccgcacgatcgtcattccatgatcatatccaggcgagttgagaattttgaatccgtctcagtcggtatttgaaggggtcatgatagtcgtgctatgggaggccaatgatgggttggtaaacagtgttggacaacatacagaataggatacatgcatacttcttagccagtgtgtatttgatctaatgatgagatcactcttatcatgagaaatgacatgccaagccaaaagagggggtcagatagccgaatagactgggagccacttccccggattttagtctcagctagttttcctcaatcgggctaacctatattataccaaatatgtagaaccctgtgcatgccgagctattccttgaccttctatatacacgagctgaagccaccagaactttaacattctaaatattcaagtccgagtgcgagctcaatgtgacttgagactaggatatcttaaaggacccggcacagtgcatatggcctgtgcgactacggagtacagagttctacatgtaaatctccagggcatcaacatgcatcaacattcatctgcattgcacgatgtcctttgtacatcgtagggcgatcccagcctcctgtaggtctctttttctccgtgtgcgactgtgcgttgctgcaggaaagaaagcagagattggaattttcaagatcgatgcaagggtccttattccctgaggcttttttttttggggacgcatcatgtgagagaagtttcttgctatctcagtatgttcatgcttgacagtttgagtttcttcgtacgttgccgagtcaacacgggcatgttgtgtcccctccattttcgccttacagatcgagtctgtcgccttctctgcggggggaatgtgtcggcgaattggctactagatgtgcagtatattgcatattggctttctacggctccgttgttgtagttcatccaccctacgttgttccttgtatgctctgttcggatgtcccatgataacattatagctatcaggatgtatattcaatgctaatataccccaaaccctgatatccattaatacagattcggtgtttactattaatacggtggcaacatatagtacaaagtataggaggtccaaaacaaaacaccgtcctcggcctcctgaccccatgccacattccataagggtcctgccaacgtcattccaccctgacatccccctttccgttccaggtggatcattgttacacttgagttaataaatcccaaatacagagtgtaataaaaaagacctcataattgagtgacgttgagagacccattattatttgaaacgaaaaatgagtaatacagtggagaccaggcagcgccagatggacctctgagggccatttattgcttctatttacagattatggagtacttcggatggtattgggactcattgagctccgcttgcatctagactctgtgttcatctggtcatggcgatgcgtgttgaacttcgagtctgtggcgagtggaatcggtgggagcgtactccgtacaatggtcgtgttgggaatcggcaacggattcgcgctctgtctcttggagttgggtctggttgaactgtgaatatgtatcagccggataacggatgtacggagtacgagatacatcctcaggtgttgacatgatgttgacattatgtggatctgattgtacgcttggccacgtaggcggatcacataagttgattgtctgtcttcggaggcgaatttatatttgttatcttatttggttcgtgtagttaaagcaattgtttattctggttgttctagttcctatgtcgaaaccaaaagacgctggttgtttatatttactcggtacctgaggatctatattgtacgatatatctctgataaccacttcatctcttcaacatagaatctactaccaaaacatatctatagatcaaaatcttatacaccctagcacacatacatagtagtttgacttatatcacccattgaagtcgcgacggaggcgatgattcatagcaggatggcctctgattggccgagaacccccagggttccgcgataaaaaaaccgactgactcaatatcaaacccccaggatgtcgcgagaaaggtccattctcgaggatgcaaaatgagcaagcgctcgctcgaggagtccagggcaggtgcacatatgtcgcccgatcccgacaataatggcttgctgcccatccaggacctgctctctcctggcgaggaggagcacggtcaatcctccggaccctccaagaaacccaggaacttcattgcgactgtcgtaagtgcccaatttgcctcgcctattttttccgcgacgcgaccgagtcatccggtgcccgctaatcccaggtaataggcgtgtgagacttgtcgcttgaaaaagaccagatgcgatgaatcgcggccgaggtgtggactatgtaagtcgcttggcctagagtgtgtttataatgagcgtaaatcttcaaagtaagtcgtcctcggtggttttcatttcatgcgcttatacgatgcagacgcgatcaatctctcacgatgatcatgagcactctccatcgcctggagacaaaattggaaaatatcccaacgtctatcttgggtgatctgcagtctcttcggagccaaattcggcctgtccgagagccgcagacgcagctatcgcctgcctttggtggcgacaaccagcccctatcaatgctgtcctctatcggggacaacttcacgcccgcggcaggagatggagatgactttgaattcgaagagaatcaaccaaagtcagactctgcaggccggatttctatttctttcagccagcatggtgtcatcgtctggcctggagcaagacagatcctcccgaagcaattacttgccgcttatgagatgctcgggaaaaactatgtcattgaactggaatcagcacggcctccgctgccgatgtttaccagtccctatccgttacaagcgggagatcactggctagaaatacttccgttggcaatgatcaggggtctggcggatgcgttcttcagtgtttttaacccctccacgccgattatggacaaggggttcttcttttccttcactcttggcacggccatcgagagtggctttggatataatctcgagagttgtctagtgcttaacgtgctagcattgggctgtctcgcggttctcgcctaccaggaaggaaactatcctttgccgggtactcaggcccatcgatttgaacctccagaatggatgaacgtggtgtacgaagaacagcctggactgcggttctttaatgaggctcgacgacgtatcggcttcttgatgtgcgacaacgatatccagagttgtcaattctaccttctttcctcgtacgtatatatgcccaagcttactctatacacagattgatactcatcttctatagtgtatattataaccagattcctcgtccgatggattcctggacaatggtttctcgcgctgctacttgctgtctatcaatgttgataaagtgagtcctgccctaatcaaacatctggtatgatactgacgcatacagccataatgtgaacttcgatgaatgggaaggcgatatgaaatcccgcgtatactggaactgtctaatgaacgagaccatcctcgtacaagagctgcacctcccaccaagcggcctctcccgtctcgaagaacaagtcccaattcccaaattcatcggcttcgaaacaaccggctacgcctcgaaccgtttcaactcatccagcgtagtggacgactcatacttccaatatcatttcctggcccaggtagcccaccgtatcatcctcacgcggatccgccattcactctacttctactgtgagtaatcccgccaatccacccagacacccaggcaccctctaacacccaccctccattagcggattcaggaacattccccctcccagcaataaacaccgagctacaccaccaactagaacaatggcgcaccaacctcccaacagcaatccaattcaacaacgccccctactcatcccacccaaccccagcaacaccctccatccacacctccccacccgcctcagtagcatcgccagcccacctctcctccccaagatcaagacccacagacccgaaccagcccctttcccccgcaatagcagtagcagacgccatgcttaaaggccggtacatgatcgcgcgcttccacatcggccgtccgtatctatacaaagctctccgcatcccgcacctcctaacagacgaagacttcgtgcaagtgcgcagcggtctgcagaatgcaatggactggccggttactcagggtatcttccggaaaatgaagagctgtattccgattaagtttgctttttgctcgcagtgagttttgcttctatgttttcctttgatgcctaagactacgtgtttgggaatctttaactgacttttttcttgaagattctttggtcagatcttgctcttctattgtatagctcattcgccaagtgcccgtctccgtgagacgctaccggatggctgggaacgatggaacgaggagatgctagggtttttggaggactgtgctgtgcatagtccagctgtcacgcaggatctggaactgttgcggtatctatggcctgataattaggtgttttgcgttttgcgttttgcgttttgcgatttatgggatggggtatattttattttgcgagagatggattctgttcatttctatctctacaactacctttatggcaatttgtttatttgcgcatggggctgagtagattattcgcagtggatttgctattgtacgcatctagtaggccatgacgtgcaactggacaactattggaaggcaccactcgatcccaaacaggcaggaagggactggcaagggactgccccaaggcaagagcgttcctgggactctgcctgaggaaggaacgataacaaaagtgggtataaattgaaagttaaggcagatattgtaacctttatttcatctttcacgtgtgtacaagatcaatgtttgaatccgaatcattcagtatagctatgtctatatacaagggctaggcctcatttatcatgtagcacctgcttaagacaaggaagggtattgcgaaaaatcaaaacgaaactagaacaagtgtttctgcagggatattgtctgaacaccacacgaacaagatactagacgacaccccatgccatgatgcatgggggatgcatatcagagagcccaatcctcggccgtttccgattttccgatgaagggtttgtcaatttgtttgatggcatggtcaccgcagaggatactggaaagatggttagtgagatatactaataagttaatagggaaaacacataccaggcttcagcgaccagcccatctaattccttaacaatctcctcgcgccgcgaggaagagatatcaccactgctgagctgcgcctgcagatcccgaatatactttttcttgccaccagcaccgtccaagacttccctacccaggcagtcactgtggaaagaatgctgacaggggaagacgaagaactgacggctgagaactggtagcgagcagatccagcacttctcacctggctcaacgatggcgtagcgagtatcgagaccggaaatctcaccgcggatttggcgggctgtcagggctgagttatccatctcctggcggagcgagtcaatgtggcgcgagtagtcctctaaagcagtacaaatctcatccttgaagtcgtcgatgacgacaaaatcggggaagaacgggatcaggtcctcgatgcggagcagctcgcagcggcgcaggaattcaatcgcctctttgatacctgtgcccggttggcggatcttcttctcagcgacgaggagccatagctttttgcggagcttgtcgttgccctccgggcggtctgcgacgatcgcagcaagttctatgtctttgtgctccagggctagctctacagcttgtagatactgccccattgtgctgtatatgtgaatgcatgattggattcgttgattctgaatgcataaacgaagtgcgaagtctgcatcgtatggagggtggggtgacggttgcgattggagataagtaagcagtccagcctcagacggtgaaggactggaggcatgtattgagataagggtgttgtggactgctgcggatggatttggatgattgacaatgatgaagtttagataccggacggcttggttctggttgagggaggagacgatggctgatttgttgtaattcaacaacgcagggatcagtctctcaggatcaaggttcgtttgtcgcatcaggatatcaaccaggtctgtcggcttgtgtgtcatgagcacgctgctatatttgtagaacacatcgggttcgctttgccgctgcaagaccttcaaggcttccagccatttctcgcgctgaatccagtacgatagaacatagttgtaatcgtttgtagcggttgcgaagaacaacaattcttcctcccgcccgtggctgctgataatatcatatactgttttcttgtccaagtctgctttgtggctgttcacgaactcttggaaatcagttcggatgctgccaagctgatccttgatttctccagtgcttgtgccttctgccaattcggctttggtggcgatattgtcatcgagagaattcaacttcgacatgaacagttccacaagccagctcgcgaccattattctttgcataagcgaggcctttttgtatgttgccagctgagagaggaggtagttccgcaaagcatcatgctctttatgatcaatcatggtaagacaaacctcctcgaaccctttactgctcttgccccatactttggctgcctcgaggaagttacccttagatgccaaaaaatcacccgaagcagtcatgacagcatctcgctgggcagcacctcgtgcatactgaagggcctcatcgaatttctgctctttcaagaaggttctccagacatctctatcctcatcacctgctacaacttcaaaaatggcctggctggtgaagagccaatacgtgtttttggtgaggtcagtcaagaggcccagagcgctttgcccagcttccaacacgggttgatcgtggacaacctcctggctgagacgattgactgcgaccactctgcccccaacaagtgctaggacatgccactgagacagagtcatggcagaaatggggtcttgtatcaatttccgccctcctcgcggtgattcagaagctggaaatagcgagcgcggaagcatccttgccgtcttgaatggaggttccgacgtaagttggccatgatatatcccctcggagctgagccacgcaaactgcttttcggtataaccctcggcttggtaaccctctgaaattgtgggcgaaattaccagcgaggatggcgcagagctagacgcatttggaacctcgtggatcactggcgtctcgcgctggaaaaggtctgaatacacgccgctttcccttccatgctttgagactcctgtccggccaatgaaatgaagtagcttcccataggttgccacaagcactcttctttgatcaggcgtagaggacactgtttccgcggcgattccgatcaccggagaggcacctggcacctggtagacgggggtggtatacttctcctgccggtagctggagggttcaatataagtctcgtagatgttgccatcagtggcaccaatgaggatttcccgagtagatgcagtcggtaaagacggattccaagcaacgctttcgattgacacgccttttaatcgtgccaagggtttcggttgtcgcgacggtgactgggcatggagatagtagttttcgccgagggtcgtggtgataatcaaatgagatgccgaagggtcgaggaacatgcgccgaatcactcctatttccgaggatttcttagggagatcgatgtctattcatgagcacggttaggtcaacatgttgtggctggcatctgctgcggggaaggttcggaagtttaccttcgacatcttcaggggaatcaagatcgattcgtagaatgcgattggtcgatagggccagtacaagcacgttgtttgcgacttgcgctgcaacgaagtccgcagcgacggcgaaggccaactgcactcgttcaacgtcgaacattgggagggaagagctcggtggctccattaagttgctcggagcaacataactgctggatgggtccagcgccatagtgcgctagctgtaggggcactatgtcatgccgctcatagaagagttgaggcaagccgagggttctgcgagtttatgcaggacggaatgggctcttgaggtcagccctgatgccttgacacctgaggccaagcactcggatcaccaaatcagaactatacagttaactagttacgcagatctataacaaggcaaaataagcaaatttgtagacatctatgaattctatcataaattgcaagtactaaagtccctccgctcatgtatcatagggtatcatcgttgctgaaacatgcgacatctagactgtggactgggtatctcaacacaaaaaaaaaaggaaatcctcgcatcaccagcctcacatcactacacattcccgatctattttcctgttcttctccttggatttctccttggtcttccctttattcctctcgcgatccttcgttcggcctctcccacgcttctccttgtgctcatgtccgaatttcgtatcgtccacagtgtcatcaatctccaatgcggactcatcctctccattttcttcagtaaatccgtcgttgctaatcttatcccgactaagccgttcagcaaagcgtgaaaaagtggcactgattctgttttcactcgtttggctgccagcacggcttccggggctacccctggtcgatcgagatccaccctttgtgctctcctttgggcttccttcttccgtcggtgccagcctaggcgatgaggacggaatagagcgcggctgaagaccagctgggttactgatttctgagaatgccatgctaggtcgccttgcgatactggctaatgttggcgcattattctcgcctggccctgtgacctcaacacttggtcggtcagaagaaaagtcttccatgctgaaatctgtttggtcgcctagtgtactgccgtctgacgcccgagacgatggtgggttcggaatgttgggcgcagctgggtctgcgccgatcggaagaatttggtagaacagaagatagggagactcggtcttcaatgcttgatcaatgtcaaccagcgtcactcgttctgcggcgagatcatcgaaccgcatccagtgttttgatgtctccgaggattccgggcctgtggcagaattggggcaactggtgcctcgaacaatggaaatgtaatgtcccgagtcaaccgagttccccctgtggcaaaccagagcctgcaaagatagtttaaagctcccataaatgggagcattcgcatccatgttgtcgtcttggatgaagtgaggcaggccgatctcagttgggatatcaatgtgtgtattgagtctgactgccctcccatttggcaagaaggaatagcgttttaggcacatcccaagaatgggccgttttgtggaaaagtgtgctgcaacttgcgcatcgtttgttggcgtattatcggtataccatgctaagcaagattaggtcagttgatgcaaaacttcaagaacaggacgaaagatgacttacgtatcaaactgaagaattgccacgcaggcatcattacctctttcttgtatgaaccccttcgctgttgcgtatctccagtagtatcttgatctgcattggtaactttctccggattcggatctgtctttgtaggatcactatccggaaagaaccgctctcgaacaatactaccatttcgacccggtacccgagatgccgcgagggattcagtgaactcatcaaacgatgaccagggggttggcttttcgacccgcgacgtagttgattgaacaggagacatagtgggtgtgctctcaacctccactatttcaacatgtgaagtggatcccttggatatggagagtgaatccattgaatctctcgcggtgttgcgtcgttccatgtgtcgtttgacttcaatgatgttattgaaataagcttccagacagtcttctagcgtgagtgaatgtccatcggttggctcaggcgggatggcaacctcgagaagtctctcattgatgaacttatggtcatcacttgcatcctcctttccagtatgaaaaatatccatcttcaatgtgagaagcggcagctctaactttccggtgatgaaagtgaatgcttccgaagcatcctgttgctgaagtttggccgcatcttcccagccacattctgctagggcatcctgtaggtgttttgtctgaaaccattagtcaataccagatatgagcacaataacaagtgttaaactaaccatatctgtggtgataagcttccccgatcgtaacagattcacccatagccttagaaggatcacaagctttcgacgaggctcatcattaaacgatttgtatagaatggcttcaaaacaatcgagacgggcaaacatggcgaacaacaatgcatctaggtagcatgtgacaccttggcgattctctgcacctaggagcttggtgttgggtgtgtaattcctgatgatgccctcaattgagtcctctagtagaagtagcaggccgaatgctttctctgtatcgccttgtgtagcttgcaatgcataactaatgtgatcttcctgtaaggcagtgattcccagttgtttaattcgttgagcaagggctttgacctagatgtgaatttgcaacgttagacaggtgcaagctgaccgttgtgcttagccataccttcttctgatgatcgtgattatctgccagtgaagtctccgacttgaagattccatggaacagaggacgtgaaaggatatgggatgcctaggaagtacagaacattagccaaagatcttgtgtttaggcatcaaagcgttcttagcatacctcttctttgctttgcttgttcaacttattgtgccgatcgcgacgcgtcaggaaccgatgaattccactcattatcacggatcagaaaaaagaaaatactcttaagagcagagtttaaagatcgaaacgaaaatcccatggagacatgcgggggatcatgagaccggtgttccgtaaactagctcacaacttagtcaaggctgcaggatttgggggaaacgcatgtataatgcatcataagtagagctctttcaaaacgaacgaaaagaagtaagatagtctcgaaggatttgaagtcgatggacgaacctctaagtgatctgcggggcagagcgggaacagagaacctaagccggagatcgaccttttgctgccctaaccttggaaagctctccaccgcctaagtccgggtgtgggcggtgacgaggaacttccagaacatttggagatatgaagtatataagtgcatacctatgtgtgtgtaggaagattcataagaaacgacaagactcatataccacttcatcctagcaaaccccaaagattgtcttgctcggtgacatgttcgtctagtcgacgtcagattcagattcttctagaatggaactattacaactatataaatgtctaatttagtggtattccaaaatatacggagtatagcataggaagtctaggttaaaaggcaggtatttacatagtatctagtagggctatgttcttatatagttatatagagccctataagctcctagtcttgtccttatagtacagtagttgttcctcgctctataattgcgtgaaccatacctatatgtatccatggataggtgtaggtattgcattatcattcataccgcagacctgctcctctaaatagccgtccagcgaggagtcaggaccctactaggcaaagattgctagcccactcatcaccccttgaggattgagtaggaatttctagccaacttcatgcataataaggaatatatcccaacaattgcagtagtaggtgcggtaataactcggaacaagccctatgtttggtcattggatttggtcaagtcttcgcggatataatcacatatctaacatctatctaaaattgaaattgggcaattccaccataacggaatatgacgaagacttcagccgagcaataattgacgatcaggtacgtatccatggatgagttacggaggacggagtagttggaggtggatatagtgcctgttttgtaaggcgttattacccagtcctcacgtgacgggattatctgcgcgaacaatttttggtaagggcccgggcttatcctcaatccatcacaccccatttttcacagaatggctgccagagagccgtgcagatacctaacaagggcattgccccgggcctcagtgccatcaattcgccctcaaggctttttctcgagccgcaatgtctctgatgaagccccagccaggcgtctgtcggaccacctaaccgagctagaaacggcgtcgtcgctgtcaacacctgtcccagacagcgcagcagcatcgttcgatccgcttgcacgagcatccgctcgcaagacccagcttccccgaggccggtaagagcactccgactacatcttcggtcatgcgcatctgcagacatgaaaacaacatcgaacatactcaatgaacaataactaactccgacaccttatcacagataccaattccgctcccccaaatacaaccgtggtcccctccaccctcaccaaccgccgccaccatccgacccctcctcccggctgttcgtgccaggcccattctccgcgccccgagcagagcagaccttcgactcaaccgtctcccccgacattatgaccctgtgctacgtgcacacgccaccaggcttcaagccgccgccgaaatcggcccgtctccgcgagtgggacgacagctcgccatatcacaagaaccgtgtcctccgcggtccccgtggcggcgacgtcctgcgcctgctccgcaagccgatcaagttcaacaacatcccggaaatcgagcgcatcacaatccacagctatgtcaagaatgccgcggctgagcggaactcgtcttggctgcacgtcgctggtattgccattcaggccatctccaatgtgcgcgttcagactttcaagtccaagtctaacgttgctccttggggtattgcggcgaaccgtgactccgtcgctgtaaaggcagagctgtatggcgagaacatgtaccacttctttggtaagctggttgatgtcgtcttgccccgtatcaaggattgggagggtgtcaaggggtccagtggtgatagcagtggtaacatcactttcggtctgattccggagaatgttgctcttttcccggagcttgaggtcaactacgatatgtaagtgttctctattctatgtttctattgtcttgtcaaggctaaccctgcttcataggtatcctcctaagatgatccccggttgccacatcactctccacactaccgccaagaccgacaaggatgcacgacttctgttgagtgccatgggtattcctttctacggcaagatcgtgaactaaatcgactacttttggtatcttattatatctccttttggatagtcttgtgatatccagcatgtaactttagagaagacctgcataatggtcgttgttattattggaatcgtgtactatggcttaaattcaatctacatttacggcgaacaacagcacacagcacaggatgattggaaagtgtcaacaggaatctttgctcagttgcatcaactataataccgagaaagcacccatgacccagataatcggtcaataaagggaatatcaccattatacgtaacatcatattacatacatgcatcgagaagacacagaagagacgaaagggaaaggaaaccgcggctaccgctaattatgggataggtgtggacaggaacgcgcaccggagcagttcatcggcagtaggccgctgctcgtagtccaggtggaaagtcatgtcgaggaaatccacagcctcctggctcacattgtctggagcaggggggcgagccttgttgctgccgatagcgaaaatggcttgcagctggctgcagtccgggaaggggtgggcaccaatgaacatctcgacaacgagacagcccaaactccagatatcggcttttttggtgtgtgcggtctgtcgcacgacttcgggtgccatccagtacacacttccctggagggatgtgcggtggatattggcaccagcaccaccactggcccgggcgccgaggaggtgggatgcttcgacacgcttggagataccgaaatcggagatcttaacaccacccttgttgtcaactagaatgttggcacccttgatatcacggtggatgatatcccggccgtggaggtatgatagaccggctaagatttgtcggacaaagttcttgacaaggggttcttggaaggtgttgtactgcttcagcattgtggcaatagacccaccaggcacatactccaggaaaatgttgagatactgatcgtcggcaacggtgccaagatattgcacaatgttcgggtgggacatgccttgcaacagctcgatctcatgcttaagagcatttaccatgaggttcttccgttggtcgaactctgtgccctttgtagcagatgggatttcaacctgcttgacagccataagctctccagtaatagcatgaagagccaggtaaacgcttccgaaagaaccctcgccaatcagagatcccttcatccagttctttggtgcaaagttatttccagccaggaagtccacaaggccatcatcctcttcttcgccatcctcggctacaatcatgctcatgcgatcgttaaaggaaccgccatctgtggccacaacactgagactctcaaagctctggcgcgattgccgcgattgattcgcgtcgtcggagccactctcaaaggagacataggattttcggttgggctcagtgggtgactcttcttgaagtggctgaagggaactagatgctatagaatcccgatatgaggattgaggtaggttgaacttggaaactgaaatgggtcgcgggattcgtactgcctgtgccactccagggccatggagccatgcatcggcaatgctgggaattggaggtaaatggggtaatggcggtaggggaggggcatctttcatacttgatgcaacgctgtagttgctcataacactcatacgactggcggcacgactcaaacgttgagatctgcgcatggtcttctcgatgttttctcggtcatgactggggaagaatgattgtaattcgtgaataatcatctcacttggaggtctctgtccgaagaacgagcggagtttagccacaggattacgttcactgttcggaccttgcgattcatcaacactggagttggatgggcggtgtcgagggcccagcggagaaagcggctgcttaatattatgccaagattcgccggtaagttgctggatcttgtgtttctggcgctggttggaattactcagagcatgctggtgggtggcctggctctcatcatatgcaagctgggatgcacgacgaagctcgtcttcatcgggctccccagcatgaatcttccgtagaatcaagcgacctcgctcggacttgttgtagccatcgcaaatctccatgagctccgattcggtgagcttccggcaatttgacaggtctgggtccagtccgtctaatacatagaaacaataatttctgtattggtgttcaggaagctgtagtttcttcaaaacacacaaaataacttcatctggtgttctgcagttccgaatatccaagaccttggtttgtccaccggtgtgtatgacacggatgacaggggagtttgatgggagggggcccatcgtgagaccgtcaagactagggtttcgaggatgggagctcggtcgaccttcgttcggagtagggggatttcggccagaacttgagccacctgaagatgggtgattaagatagtccttgcgccatgtgcctctttcggcgtcaccggcaggtggcgacgcaggctgagacagcgatttgctgttcagataagcatcatcagccagctgagatgtgcgtcggtatggtagccgggaatgagtatagcgggaagaatttgacagcgccgtggcttcgagcgcagctaaggtattctgtatcgaagatcagcataaagtagaagagacgaccgatttatggcagacagacacccaccatatttttctgtcgtgacgttgctccggatttgtttctgagttgcttgatagcgatgaagatgcgcacccggtcgcccaccttcttgatgcccatctcttgcaggatcttttggtcgcattcgagtaaattatccccgttgaaattgttggctgtaaatcatcagtgacatcctgggtgtaaagtcgggacggccgtgcgtatgcgtacctctaaatatcgactcatattgcccacatttgatgctatgaagccatgagaccactcgtctctcatcccaggcactatcgatagtcagaatcactgcggtatctcggataatttctcaaaagccataccggaccgatgcaagctcgtctaacccctcggaaagctctgaccttgttgggctgacaaaccccaccccatcctgggctcttgtagccgtcgccggtctttgggacgaatttgtgtggtatgcggtcgatgattgcgacgcagatacacccgtaggtgcagaatactgcttaggagccaacatggctgagccacctgggcaggtcaagcgaatgactcgtcgggttcacgtgctaatcgcctgcgattgatcgacacagcgttctttccttcactctcggggtccttcctgtcaggtcgaacgggggatccgaataatgataaggcgtcggtcaacacataacctcggcttcctggtattcagtcagcggcatgttccaggtggttttgattctcactcgccccggcggggggttgctgaggggtcgggagagtgaacgacacagcagagacaaccacaatgaatattgaaagacaccgaccagggtaaaacaatggtgattccagcacagcaggcgaaatcgaaatgagggacctcaccgatgcaacttaccgtctagcttttttgaggggcgagaccggggttaggtggtctggatcgggttatcgagatcacaactccccacttgggaacgagaaggtggttgacagggataaaaatcgggaggaagtcaaaggttcaagagatggagtttcgggttggagtttggaatatgaaacctccagggctggaacaccgggagttctctgactaaggtggtacatgcagcccgtatcaagggggaaagctaggcccgatgttctcctccacgcgtttctatctctgagctgtctcatcctagtacccttcggtgttcatccaaaaaaatacgtcttgggctacttagtggggcttggctatacataatagctgctttgatgacttcacctgcgcttgcagccatgaagcaacacgtataattaggcgccctgctgtatatattagttggttcgtttaacgatatataaatctattacactggtatttcccctgctttgaaaatatatacgatgtacaacctctctctataggaagtactcagagactttgataaggttatgagctgtagattatacatattgctctccacccccttgcctaacgctatagattgtcggtctctagaggttgtttttgccgatatattcagtgacatgaacactagttatagacgagctggagctagtaccatatccttttggccagctcagacagagtttcagatagagatcacctcaactttcagattggctgtttcttagatcagttccacaaatttccttccctttaagcccaatatcggcgataaggtactaaaatggaaaggtgagacacacgagcccccactgcgatatgttcttattttttccttttccatagtagtagtggtctacagggtacatctattttacgaattagtatatttgaaacaaggagaggatcaaagaacttctctccgaacgtgccgaaccaatgcttctcaggctacactttggtgtctattagggctttgattttgattggctcctcgtgcttcttaagcttttcatcgcatatggcggctcgcgttcagcgaacatatcactcattttgggtaagagcactattcactaacgggatatgacggtgagaactatggtggtagaaacacatgatgctaaggccgtggacggtgggtgggaggcttaaaaaggtgtcaaagacggcggtttctgacctcccatttgtttcattgatatatagaatacggagtatatatatatatgttctatctagctcctatggaacataggagccaccgtttctgtgaaccattgtattttctttcgtccttttctatctactactacttcatacttcatagatagggcatttagacgggagccctataaccttcacctatagtctacaaaccaagattgctctaggcataatgtctaccccgccaatgcttcagatgtactttccggcctaccctatctataccggacgactttcaatcgagtaaggctctccgcaccagtggagacccgagcgcatgcatacccggcctgggtatcagcatcaaacactaggctcattcccaacaccttccacaccgtagagcaagaggatcggccctttgcatatgtagaatgagaaataacaatctcatgtgtttgtatcctcgagcccatatagttctataacacgtgaccgtcccctcactgtgggggttttagtccattttccccgctcaaacagcccgcggcctcaaattcttcccctccctagtgcgctcccccattccaccccaaaactccaaaaacaatggaggacgaaaaatcagccaaatctaaaaagaaagctgtgactcatcggaagtccctgtcgtgtgaatattgcagtcggtcttttgctcgcttagaacatctccaacgccatctccgcacccgttgagtaaccccctcttgctcccggcttcttggaattcgtctaatgtaggacaacagatacaaaagagaaacccttttcatgtgacatttgctccaaatcatttgctcggaggtaggcttatattgcgctcaatccccggaatagaatgccaatcgcttatcaaatatgaattttccagtgaccttctagtgcgacatgagcgattagtccaccctgctgaaagtgcagccagtcgagaacaccgggttcagaatggtcacgagaacaaccatgaaataccaattcagtccaacctcatccaacccgcccatcatgagtcgcgcatgttagagcttgcagatgccatccctgtccacacccaagtgcctcctccaccacctgaagtccaggtccagactccatcgattatagatacacctcactttaatccctcatggggatatgatttgaatcttttatctcatgccgcaagccatgtcgctttggagggtcaacaggaaagcctagagtccatgagaaaaccacaacacacagccactcctacgtcacaacaacttcctcatgtccaggagagggcaattgccgatagttatggtgtagagccttcgattcttgatctcacggatcttggggaccctgtccaggattttacggttttcctggaaagcgtgggtttgtcgtctgattgggactcgggcgtgttctcgtcggtcgaggagcccatgctaccaccgagtatgacaatcgattcgaaaccgccccgtgagccgataccatcacgacttggcggggatatcatgaatgacccgcggggtcccgcggaagatcccccgtccttctcgaattttggatcccggctgccatcactgcaaccggaatctcacgaaatggacgaccgtatcggtctttccgacgagagtacacgacctgcatgggacatctctaattcggatcgccaatcgttcatttcgaaacttgaagaattttcatatgttctcccgaaaggatttgttccgccatcgcggcatgccctatcgcggttcttcgccgggtatatcaacggattgaacgagcatcttccttttatacatgtccctacgctatcggttgctaaatcctcacctgaacttacgctagcgctggcagctgcaggttcacactatcggtttgagaacagccggggcatcgaccttttccatgcagctaaagcgattttattggagcgactccgtcggcgagacagcaagcaagtgcttcagccgtcatggaactatatatccccatcatcagggtttcctacctctcgtggttcatccatgatttctaacacggcgggcagccctttccaacatcatcagcaaatgtcaaatccacccctcaacccatcaatatacacgctagatgactcagatgctcatatggaagtgattcgaacttttttgctgctgactgtgttcgcgtcctgggaacgccatccagaactcttgcgggagattctctcgcttcaaagtactttggccaggcttgtgcgcgaacatggcttgtctgaatcaccttccacctcagaacctaccaactgggaggagtgggtacggagagaaggtaacagacgtacaaagcttattgtatactgtttcttcaacctccactcgatcatgtataacatacctcctctgatcttgaacgcggagttgaagttaatcatgccgtgttcccacgaactctggaaagtgaccaattccgcacaatggcgtcgcgtttatcgcgccagacagggatcagatgtgcctttccaagaggcctttgccagactcttcctcaagtcatccatgtcaactccgtcggcacctatatccccccttggaaactatgtcctcatccacgccattatccaacaaattttctttgctcgacagctctgtctttccgcacctcatatacagggcactagtttgagacccgacgatttgaacgtactagacaattcgttaggcgcgtggaaggctttatggaagcgcacacccgaatccagcatcgatccccagaatccggccggcccaattgcattcacttccacagctctgttggggctcgcctacatccgtttacatgttgacttaggtccctgccgtcacctcatcacacaagatccagtccaaattgcatcagctctgaatgagtcccctgctatcgcacgtagcccacggctgatcatggcgcttcttcactcagcccacgctctttcaatcccggtacgactaggaattgactttgtggctcgaacgcattcgttcttctggagcattcagcattcgctctgcagtctggaatgcgccttccttctcagtcgctggctactcgccattcccacaacgcactccgagcagagattgtcggagcatgagcggaagttgctcctgtggatcaagagtatgatggatgaaaccgaaatggcggttgatccgcctggcgcaccagatatggaattcatggcgaatccgtacaaagtgcggcagcttagcgttgcgattgtccgcgtctgggcgcgcacttttaagggcaatactagctgggcgatcgttgacttggtcggctcaagcttggatgcgtatgcggatctcctggaatattaatttgattgtttcgaggtctgtcgcttgggaggttgatctttgttccattgagcagagaatctccggcaaagatgcaactgacgtctcttctaagaaaaaaaataatggcctctttggaatggccatcctaatgatcacatgtttctcttttggatgatgtctcatggagttttgtatatgggggactgggaagtaaggttatttgtgttcgatgtttgtttgatctatatgtatgtattatgacttcgtcatttgcttagtgctgtctataccccaccactgtttgttgtggacaatagcaacttgtttctactaggacttgcatatagtgattctctcaaagtaactctttacctattcgaggagtggtacgtaaagtatattcgtatatatttatccattttgatcatgatctcatctctcataggaagggttgcgtattgacatccaaacgagcacaacatatatagacaggactatttgccagccaccttgttgcgatttctagtgacgcttgtaggcacgaacttcagagcagacatagacttttccaggtcatcaatgtccatatccatgtcatttggtggtttattttcagggatagctgctgccggtgggttcgattgagacgccgagcttcggcgccgcaacctgccctccagagccgacgacgttgagagacgtcgtctgtggctgttcatgggccgcagcatagatgtttgcttatcgatgccgtcattgacaatgtagaagttgtaactctgtataatgtgtcagtgacgtaggggcgctattttgatctgaaactcacccggggaaacatgtgtttgtcgataagatgtagccgtcgtttctgcggggttgagcatttccgctcgcagtcttcgatgaagcacccatactttggtttgatttagtaacgtgggggtatagttaaggaggtaggctagggcttacggtcttgtctccacgggcccgccgcgcagcagctagcgggtcatggttctcctcgatgtgtatgttgagcaaatggccagtagggaagttcttgctgcacttggaacagcggttgacatgggattgaagataatggacctcgtagtcgtcgtaggaggtgaacgagagcgtctcgcggtgaggcggtaaggagcaatgcatcacctcagggagaaggaggttggtatcactgtcgatgagcttgttgcgctcagatggaggagtcgtagtattcactgcgattgaggatactgatattgagtcttgatcgagagatggagatctcgagcggcttcggggtcgtttcgacatggtctaattcgccttgcatattattgataggtcaacttggcgagcgtacggaggagtacagcgaccatgcaagacttaatttattcactctccgccttgtaatctttttagaagtctttttatatgcttttcttctgaagatgtcttcttcctcttcttaagctttctggatagatggcagaaaaaggcgggaagggcttatataaattttgatgagcggcgccggcgggttcatatagcgatttgatatcttattgactctacaacatagcaagctacttataggctacgcctctaggatttaagccaagtgtttatgtgtagtattccttaacaatgtgtgttttactttccatcatgttctcctctttttctttagatgtctcttgcctaagggttcgggcaaatgttatagaaagtacgtcaacagtatgatatcaacatctcgtaccaaaaagctcaatagaactagttaaaccagtttattctgaaaacatcggcggacggcaaaaatacctagttaggtcttttccatagatgctataaccctccgcgcgtagtggagcacagtgatctgttaaagacggtataaacctcttcgctagtatacattgagacaatcctcatcttcaccttcctttgacttgcacatgtcgctgtccttatgtcgctgtgcccatgagatgaaataaacccgtaatcagcatacgttacgcgatacctcccgccttggcaacaccaatcatcgcggatagtagaccgagatcgcatttatgcattttcatactcaactcgaatcacatcatccctgtgcgctttcatgtctttcacatactgatggctcctccgccgttcatattccaagccatagccatctgaccggcgaggttgacgctcgggatccccgggctaacttcctgatggcgccctcgttcacggatgcctggaagttagtgctttcccctctcgatttcggctggattgtgaacattgaccagtggtgtgatacaggactgcaatagaagccgagaaagagcttctgcaatgcttctcgcaagaacggcgcacattcgatgaattcgaacatttcctctccgagtcagtgacaagccccgcgcgcacgccaacgcatggctgacctctttcctatataggttccgaacctcttctcagaatgcaatcctcctcgatttcaatgcttcccgcgaggccgatgtggagactcgcctttgggatgcgcacttgaaagtgaacaatcggtttcgcaagcagttgattcgcgtgagtaccccacggaagcttttcgcaaagtatatattcgctgactgtggttgtctatcattagtttcgcgaagagcacggcaagaaaaaaccagtggagaggcggaaactcgaacgccattatctcgatttcattaagtcaagccagcggttttaccgaggatacatccagcacttgtcgtcgcgatttggggggattgttgagttggagagagtggcgcgcaagttcaattttgagagtaaggcagatacacaagctgcgcgccgggtctctaggcacgctgacccgcgtttgtttttagatctgtccggccaacctcctatcaagccctccaaagacctgcgtaggctgattctccagtcttgccacgcaactcttatccggctgggagacctttcccgctatcgtgaatcggaactcgtcagcaaagatcgcaactggggccctgccatcggttattatgatttggcgtcggtgatcaaccctgcttcgggtgcatctcagaaccaattggcaattatcgctctcgcggatggaaatcatcttcgtgctacctaccatctctacagagccctgtcagcccaagaaccccatcctactgcgaagggcaatctggagattgaactccgaaaaatcatgagtgcttgggctaagaaagagctgatccgccccgaagatgccggtatccctggaagggccttgacctcgtggtttctttatctccatgccaaatgttacaagggcaccgacttccccgagcacgatgagttggagagtgaagttctcagtcaactagcagtagagattagagaacgatcactagaggggacacttcaaaagttctgtctcattaatattgcggccgaggattttgctaaggtccggtctattggtaagagctcgaaacattatcattgctcatacatctgcttacttatcttagaagagtctgtcttagaagcacgcgtctttttccaacgcatcaacgtgaagacatttttcaccttactgcaaatacttttggtcgaactcgaacgaactgcttcttttgaagatccgaacagcaaagatgaaatgcctatcccagacaaggtgtccgtggttgctcgtcggatcctgcccgcgcttcgccattacagctcctggctgcttacaaatagcaagtctctggttgagcagaaggaggaaaaagattcggcgctctcgattcaaatcaaagagttctggaaaatctatgccggtacgctgagcctgctcgcatcctcgtttgatgtggtcagccttcccgaggtcgattatctattggaagaagacgaagaaagtcttggttttgcacctctagatcaggatgccacttctcgccgatacgttggaagtcgtgatcagccaaagcccaggatgcacgatcttgggattgaaagaagtcaccccaacatggaaatgctctatcgaattcgtgaattcgtgattgatggactcgacttggttgttaacggagtatgtggaaagctctgaagatattataaacaaacaagcagattgctaacctcgtttagaaaatacccgtggctcttgtggacagtgaagacaagaagacatttatctatcaagaagaggatctgccttcgcaattctattccagccctcatggccgccagaatgcacttccggttgcgagcatcgagcgtgaggatatcccacaggccggtcaaaatgcatactctgccgcagaagcccaaagtctgttcggcggttcccagtctgcatcggcatctatgtccgccaacatgcatcagatcgttgagggcgttgaacgacttgttgactcggacacgtatgaaaccccatccaatggccaatttgctttcatgagttcgggggagatatcgacacctacgcatgtctcacccaatgtcaatgcttacccgttccggaacgaaaactctccaccactcaccactcccatggctcctccacctgggcttggtccaccagtcataaatacagctgagcctacatcggcgcaatcatataccccacggcctgccattcccagcatccctagcatttggacaccactgagagacaccgcccctccacgaacgccccctggccttggtccacaacatggccagcgagctccactgcaccccatggcttctggaaatgccatgccttctgagcgctcgccgtcgcaagatcagttagcaaatgagctcatgctccgacagcacttgatggcccagacccagttttcaagctcactggacgtaggatcaatgcccacaccgtgggcatcatccatctctcatgctcgtcccaccgccagcggttgggatcatggccgagcgaccttcggtgcattcgaactcccgagccagacgatgtccagcagcctgggacatcagtcatgggccaatgacgctttcatcgccagcagcctcgctggggcaactccctacagctccgggattggcgggcgcaagcctgcaacccagcttggagcagtcggtcaaaccccaccctgtggccaaggaggctgattcgaatattaaagctctcattttttagttcttctatgtgcatatgcatattacactaccagctgggcaagctgtcataattaacagtgctacccgacctccaaatatcctggcgtgtactgtgtttgtctgtggtcactgagtctacaagttcaggcctacactgacagtatgcacctttacaacgaccagacgagattgtattactgctagccagtttcacaaatggcagatcccgcactagtcctctggtggcgaggacgcttatggctttttttccacaattgcaggaacttcttcggtcctcgctctcctcgcaattttgtctggacggatacgtgcgttcaaccacaggacatgatcaatacgaggatatgaacatggacaatctgccattggagaagacatttgtttcgttctgttttctgccttttcttctttttcatgcaacatggccaggaaccgcgttatccccatcaaccttagcctcgtcttttctatcgttagaagaattctagggcgcggacatacggtgatctttgaaattagtatgggcctgcagattactcggggcctattaccctcttgacaccatcgtgtcggttaggcaattgaaattcaaatttgcattttacgtgcttcttgtagtatctacggtatgggctctttcttgcggataatagaagggtagatcgcctaaatactttcatttatcaggtggccgttacaaggacagccacaggtaattagacaagattctcaaaagtatgggttttgttcgctttttcagacagtacgttgaagtcatgaaattttaagaaagggaaaaaattgggtatagagggttgaatcatccaaagtcaagtggtgctcatccagttgttgaactggatcgcacaaaaccttccaattaggttggtagatatgttgaaggtgttggtagtctatgctttttttcgtagcctacattatgaacgcttaggagcgggagtaggtctgcttgggggaggggaagctgcgagttaagagttgttagctagtgttcttgcaatgtattactttgggaaaactcacgaaggtccaagctcctggatgctcttgctggcgagccactggcccatgtcgatgctgtcatcgagggacttgcccgcgacgataccagcgcagaaaccaccggcgaaggcatcactataaggaatagcaagtcagtatatatgagtggattgttcagatcaatatcactcacccagcaccgttggtgtcgttgatggcctccttggagatttcgcggaccttgaactccttcacctcgacgtcaccggtagcagagccgatggcgacaatggtggggagagtgccctgagtgacaatggcaacacggggacgttgggtgttcttcttggggagctgagcgagcttcttggcgatctcagtgatatcctcggtgccccactggtggccctcggagtaggcaatggcctcagtctcgttgcagaaggtgtagtcagtgtagggcaggacgctatccagctggtccttgaagaactgagcaatgaaaggggcagagagagacagcatgaaggtctgacgaaaataaatagattagaaaaaaggtccaatgcagcagaatgcaaacgacataccttgttcttagcggcagcctcctcaccaagggcaaggatggcgggaacacagacagtcaggtggtagccaccgacgtagtaatgctgggccttctcgaccagagaccaaacctcgggctgcttgaggtgctcaagcttgtactcgttggcagcagcgaggtgggtgcacatgctgcggtcgtggccagtgatgacaacaccacacttaccggtgggctgggtctcgtcgatacggtactcggtgtggacaccggcctcctcgcaagtcttcttgaggatctcaccgtacttgtccttaccgatacaaccgatgtagacaacggagttctcagggagcatgtactgagaaaattgtcaatatcaatcatggggatcacgagggtgttttaatccatacctgggcaccacgagcggtgttctgggcagcaccaccggggatcagcttggcatcgcgggcaagcaggtcctcgtagatacccatgtgcttctcctcggcgaggatagcatcattgggcttcagatcatacttctccaggagagcggcatcgctaagaaatatcagcatttagaacttagcaccattttacttcaggttcattcatacccacgagcctggatgtctgttgcaagcaagtcagcattttataaacatgtccagatgatccttcacataccgaggagagggttctccagacacagaagagggtaaccttgagcagcagccattgtgatataattaatgagagattaaagagaattgagaatggaatcgaagtaaaaaggtgggagaagggtgggaggatgtggaggatatggaggggctggcagaaaagagcggactgcgtatccgcggtcccaccggtaccagccgaacaaccttgggagctacttctattcaccccaggctgctcaccttcgtataaaaacccaccaaaatggccgaccatgctatggatatcccgcagattctccaatccgcgagcatcaatcgcaatccagacccatctcttgacatcaatccagccaccacagcttcggagaaacgacccgtcgcggtaggcccagactccgaaacaaacagcattgcctccgacgttgtccatccaagacaagtaattcggccggtccgccgccgacacactcttcctcctcttccggatctgcgctttgagcagagctatctagccagcattaaggatgctgacacctggggccgagtagcgtggattactactagggatcaggtatgcatcaaatgattcctttggggtgtcaaggataatctctttgataatgcctggctaacatgtcaatctttccattctaggtacttctccctctgatccaaggaaccgtttggacactcgcgctctccggctggcgtttctggaaccgcaatgcttcagtcagcggacacaccctcggcagtcgtgttcgcagatggtggtacgaagtgaacaactggcatctgccgcaattgggctcgaccagagatcataagcaaatgtcggaggttgaaaatgtgagtacccacttcgccaaacataaatttctcatctgatctcgaccagaagtggagaggctgacgctcgaggagtttctgcagttttacacagcccagttctccgatgcaggctctaactgaggtcacttctgcgctggatgcgacctgtctagtgtacactgtattgcttgcatttttggcgtttgcgctgttgggggcgcctgcttttgttgattcccatttcttatatacctcgactctactatatagtagattaccttttttttgccatatctggcgtaccgggcaaacctcatgggctgccgcgtcagaacacaacatttgcgttgtcagttggcataaatctgtatacatagatctcgagtacgtgccattcgaatttagtgttgtctactgtgtagtgaacttattgattatgagcaagacaatattttgagcttcattccatcacttcgcgtgccgtttgtaccgatataatacacacagcctgatagaagtacaattgcaatccaaaaagatctatctagtgacatttcgtagaatatatattcctggcctctttctagtccgactaaagcgaaaacacctattctgaagtgaatccgaatttatagctagatggttcaaatttgatccacgccgtttgaagaaacggatggcgcagctaccgctgcagcagaatgagtcggtacttggggtatcgaagcaaaagggtgtgaagtggcaatcattgtcggggcttgctgcgcatccgagtttgattgatggagggtcttcggcggtgcttgggcggaggatgctgctgcggtttcttcggcaatttcgacttctttcgccggaggtgattttttgatctggacctctagattgctaggtgcatctcccttgccatatcgaagttgcacaacaaggctttctggctcctcattgccgcttgactcatctgcgcttgcttcgtcctcttcattatcgccttcgacatcgtgctccaaatcgtcttcaacgccttgccattcgttgccgctttcattcgcgcttgaaggaacttcagatgcatcctccaaatcatcggcgtcgtatccagagtatccgttggggtgggttgaagtgcgagccctttgcggtctgattacttcttcttcatcatcttcatcaaactcatcatcatcagctccgttgcgttgaccaatcaacagagcctcgccatagaggcccccggcgcgagatcgaatctgtctcccgcttgccgtgaaccgagggcgtctagactccgtggaagcttccgtaggagctgcatttctagtggagcggcgagcggaaggctcatcatcatcagaaaagatgtcatcgtcgtccgagtatgtgtatttcagtttcttgccgcgtgtacgaccttcatacatggagaacccaggatccggacgaacgaacgcagctttccgagcgagacggtattcgcggcgtctccgtttctaataatttattagcaaaatccaatgtactctctaggtagaaaatcacctcttctgatgcctcaaatcgagggattgaagcgcgaattctctcgctaagcttcttggagtttgtgcctttttcgccctcgagtttctccacgacagcctccagctcaggaatactccccgcgatgctccaccaagtgttgtttttgagggccgggttactttcgcggtaaaggcggaaatttgtatcatcatgcccttcgataagccaataacggcgtttcaggctatctctgccccagggttggacagacaatggttgattgagatcatcatcgtggcgcgcctgcttgtaggattctttaatcttcgcctgaaccgcttcggacgacgaaagtgaccacagtatcaaggttcgcaataaacgcagctaagagaagacatgtcagaatcgccaatcgggtgtcgtggctattaaaaaacatacacgttccacgggtgacatggtcgcaaagctgccacccccatgaagagggtttttgccctcccattcttttggccactgcgcctgatgtgtatggattgcttcttcgaggggacgcgtgaagtgatttcgtctgtatattcaaatattagataagcacttgacttggcttgacaaccgatagcgtgcgcgtcttcaagcactccgcacggtatcgggcgacaggtggcgaacatactcaacttctttcttgcggttcagaacaagcccaagcaatgcgcatagaagtctttcgatgtattctccggggggcgactcctcaatgcccttctcaatatcctgtgggccgtagtgtggcacacctttggggaacacttcatggaaacgcgcgcggaacgcgacgatgaactaaagattgcgataacttagcaagcgtgttctattgttggccaaacgcgtcatttgtccgtagaccaagcaatgcgcaaatcttcctgccaaatagactcactgcaatatcggggttgtcggccacgacgtattcatgcggaggtgacggttcccgcttcggtggcggcgtctcagactccttcttgaagtactttgctataccagtcgggtggtcaatcgccatagtagcttcgtcatccgttggaggtgccgatgataatgatgaaagttctgaatctgaaggcatggtggaagtgatggggtaggtggaaggaagaagtaagttgcgcgcaatcgagccgtcacgtctgcacgtacggcaggtttttgggtccatcgcgccaacctatgtgcaagcctttataagcaggagattatttctctattttagagcacatttgtgcaaactcgatacatgccctactctaaaatacctataatatctaactatatcccgtagagaaagtctagcgctataaaaaccactttgttatcatctttctatcgctattctagggctttttagaatatagccactgactatccccgaatattgttagtaggagacatttgatacgaactatttctagacttttaagagaatacacttatgtatcaatgttgattcatggcagccggttaaccttcctagcgcgatggacacaaaaacctgccgtatgcactgggcttgcgcccgaggctattatctcaaggattccggagacaactgctccatttgtttgtaacatattttaccgaggctccttattgtcttctgtaagagaatgaatcaaataaatgagatattggcataaaagcagcttgaatttgcaaattactgtatagaagtagagctgagctgagagactggtgaagctctatttggtattttcaaaaccccaatcaagtcaaagagatgtaatagcgcagggagaaatgaatgtgactagctgggacgaattcacatatctgttgctttcatactagacctcgagaagtacgcgacgagctttgtgaaccattggatattgacatctgtaatgtttgagaggcaagtatggcccaaggctgtttaggcctcatttaattaataggtccacacaccaaaaccatagacagaagcatagaatatacagacacaggtgtttcgaggtccaaggaagagagcaacactccaaaatgaaaagtcttggcgatatctagtcttggcaatcacgtgtgtgctgatgacataacctgccctctcaaaatctacagggcttgcactgaaagagtctcttcaggcgtcaaatggagattatacagagatatttcagtcgaaagcctttcaaaatactctttttaatttagtaatgcaattattatctataatcaccatataaacctagcggttaaaggcctatttcagaaatgctgtagttcaagccaattcaagtaagcgaccatgcgctatacccgattgggttagattagcgaccgcaccctaaagcccacacaagtccccgtgtccgatgatttctcaactcgtcaacgacaagcctatttcacttcgaggtacgcttaccacttttccacgacacttctgtccggcttccatactaacataggatcctcgtctagacagtcgccatgggtcgtgtcatccgcaaccagaggaagggccgtggctccattttcagtgagtgcgaccgcaaaccattcccgcacgaaattttgaggctgcgcatcccgagcagcgaggaggaaatgaagaataccattggaagaccacacagattcgcaaggagattggagtgctgattacgaatttttctctactttacagcggccaacacccgcctgaacaaggcccctgcccaattccggaccctcgacttcgctgaggctcacggttacacccgtggtgtcgtcaaggagatcatccacgatgccggtcgtggtgctcccctcgccaaggtccagttccgccacccctacaagttcaagatggtcaccgagactttcatcgccaacgagggcatgtacaccggccagttcatctacgccggtaagaacgctgccctgaccgtcggcaacgtcctccctctcggctccatgcccgagggtaccgtcgtctccaacgtcgaggagaaggctggtgaccgtggtgcgcttggccgtacctccggtaactacgttaccattattggccacaaccccgaggatggcaagacccgtgtcaagctcccctccggtgccaagaaggtcatcaagaacaccgcccgcggtatggttggtatcgttgccggtggtggccgtaccgacaagcctttgctcaaggccggtcgtgccaagcacaagttcgccgtcaagcgcaactcttggcccaagactcgtggtgttgccatgaaccccgtcgatcacgtaagtttccgtctatacacagatccgataacatccaggaccgcaatctctaacatctctctctacagccccacggtggtggtaaccaccagcacatcggtaaggcctcgaccatctcccgctacgctacccagggtcaaaaggctggtctcattgccgcccgcagaactggtctgctccgcggtacccagaagaccaaggattaagggtgctttttcttggagttattcttgtgacgggttgaaaatggaattctgctatgagacaaatgtacttaggcgcctgcggatgagcgtctcatgcgcccttagcgaattaagcttgtggtcaccatcctttttcttgtcgaacaaatcaaagggtgatgggaaggggtccggggttggcctctacagggcagaaacgaaatcaaaaagtcctccgggctgtggaatgatacacctttaaatttttactcgttcctatccatcaccttagtagatattacagtctagtaattcatcggcatatacatttcgatgcatgatcgttgtcactattgccagtgccatacagtggtgaaacctagcgttccacagaaaggtttgcatcacttgttgtgttatggtcctatggatgtatatatttagctctcaacgttgaccatgtatatatatgaacctagcacatatctcagcaatgtagtctaaccagaaatacaaggcatcatgaggttgggcccataattaccagcccaaacgaggttagaagcattatatatagtccgttatgctcgttgatatgtatctcgtgattctacacaacagatgtgcaatcggaagcccagatccctgtattatatgcctttgtttcttgcaaactgcctactataataaaaaaaggcatagctctggtgtaatcgatttgggaagtcaactgtgtctgtcgtaggttgacgacgtacacgcagatcaatgtgtactacgccaatctatccaattctgcccccctttcttcctctcccccaaaccccactcaattctataacagtaatttacttccatgaattggaagataaatcacagcattctcaccatgtcatccccacttgatgaaaatgccatgaaccagctacagtctgaacagtcagaactgctggacaagattgacgagctgcgcgccatcggagttggaggccttgtggagctgcctcaaatcatcgtctgcggcaatcagtccagtggaaaaagctctgtattggaggccatctccagagtgcgctttccatccaagagcaatatctgcacgcggttcgcgaccgaaattgttcttcgccgaagccctcacgacaggattaaagtatccatcgagcctggggattctagggagaatgagcaggaacgacagaagcttcgagccttcacctccgaggccttttcctctagtggggacctccccacactgatcgaaaaagcgaaggaatgcatgggcctttccagcgccgatccttcgagcgttggatttagcgacgatgtcctcaaagtcgagatctcgggccctgaaaagccagagttaactctagtggatctcccggggctctactactccagcagcagcgaacaaaccgagcaaggaatggtgatagtccagaaactgacggaaaagtacatgaaaagctcccggagcatcatcctggctgtcatcagtgcaagggccgattatcatatccaaaaggtcttgaacatcgcacagacctttgaccccaaatatgagagggtcttgggcattgtgacgcagcccgatatccccgaagcgggctcggaggaacaagaaacttatatacagttcatcaaaaacgaaaaagtcaagctgcaacttggatggcatgtactgcgcaaccgctcgtttgaaacgtgcagcatttccgatgacgctcgagacgctcaagaaaaggatttctttgaaaagggacggtgggcttcccttcctcgagatcaagtcgggatcgaaagtctgaggcatcgcctcagcaagattctacttggtcatgtccgtcgcaatcttcctggtcttattgcggacatacaagagaggatttctcataacgagcagacactagcaaaaatgggcacgccgcgcactactcttcaggagcaacgccgtttccttgttgatatcagcagcaaattcgcgcgaattacagaccaggctttgaatggatcgtacgtcgatgagtttttcggtggattccaagatcatacggcgaccacaaaagagtctcctttccgccgactgcgggcagtaatccgtgagcttaacgagtgctttgctgaagcgatgagcattcgcgggaaccggcgaatcatccaattccctggacagtcaacacctgttgagaatgtcgagcaagagagatccaagccttatatgagtgattggacaccgcagtacatttcccaggagtctcttgtggatgagatcaaggaacaggcccgacagagtaggggaattgagctaccaggtagtgcgaaccagctacttgtggggagtttgttccgagaccaatgcgagccctgggaagcagttgctaaatctcatctgttgaatacctgggattcggtcgaatactttatccagttggtcctgaagaacctcatggacgatcagacccgcccgttgcttatgcgacacctcatcggaccggaaatggagaagatgaaggagtctttgttggaaaagctcagcgaattgacctcgtactataaaaggggccatccgttgcctgtagggacatcatttatctccaagatccaggagtccagaaagaaccgccagattgctgcgttgaaaaagaacctccagcggtctgaatttgccccgacgggagtggatactttcaatgtccgagatctagagcgagcgacatctcagctacagtcatccagcgatcagtttgcagcagcagagattattgaccaaatgcaggcctactacgaggtgagctagacgtcgaaatgagatatcgggtagttctaacaggccgtatttgcagactgcgatcgtgacattcgtcgacaatgttgccatcttggctatcgaaaattgccttctttgccctttggagcatatctttaccggcaagactgtacttgaaatgaatgatgagcagattcgacaaattgcaggagagccatcgaacatccagaaggatcgggaacgtctgaatgaagagctcgaaaagctccgaaagggaaggcagactctcaatgccttcgttatagcggactcttcgctgcgtgctcgtcctatcttgggtacttacattccatataccggtacatggaatcacaggctaaccgaaatatcatctcagcaggaccgccaaatccccgagctagaactccaagccgtgcaggcacggctccgatagctcaggtggcgcccaatactcgtctgttctcgcgagtttcacctgctgtcactggtaagtagctcttcaaataccacgtcgatatgtaaaagctaattttcaagcagtccctgctgtgtcttctcttcctgtcgtgtctcttcctgtcgcgtctcctctccccatccttccttcaagtcaaggaatctctgatacagctcagggttctttattccgaaatccagggaatggcggatctttattccgagacccagggaatggcgagtctttattcacaggctcattgaatagcggatctttattcacaggctcattgaatggcggatctagacctaacaatggagccaccaccacgctgggttcattcggtttgtcacccggtacaacatcggccaccgggaatgtgtctagcccaacggtcaatgggacgtttggttcgaataaccaaggctctaattctggctcgtcgtccgctcctttcggaagttcgaccagcccaactcccttgtggaaacctctctttaacgcgacgacagctccaagcaccttgggatacaaaccagcgtaagttataggatgcgcgggacgggtccattctaattattggtcaccttgtataggtatcaggagagagagcgcgactcaaatacaatgaactattaccaaacccttggcgttatgcttccattttctagctactcctttgaggtgtgtagatcctttgagtcccttgagatatagtcaacacttagtactatatgtgaagaaggaaagatattgacatgaacttggttaggagcttcgactcggagactacgcgcgaatggacaaatatctctcgactttgccattggctcgttgagacagaatctatggtaccttcaattgttgttggagtggtgtgtatagtcatggcaaagttgcacaggaaccgaagattattcggaaccaggaaggcaaaatacaacatttagcataccaagtaaattattcaatcctacatgtacatgctatatattgtaggtagccctggtgtactaagtacaccgttgtacattgaggcattgggtagtctggacgctgattggtcactttggggtcaaaccatcgcctaggcagatttcccgaagttccctctacctggagtaatttgatgccacaatgaatacaatatacaatatctcgaagatatctatagtatgaatacccggaaaatgacagacccatccaagccccagcagatcccccgactcaacccgaatcccctcaccaacccggaacggtggcaagccatcgcaacccgcgacataaccgccaacagcttcgtctacggcgtcctgacgacaaaaatctactgtcgtccctcctgcccagcacgactagcccgccgcgccaacgtccagttctatgacaccgccccgcaagcagagaatgccggcttccgaccctgcaagcgctgccggccgcattcgggccagacggcggctcaaagcaaccctcaaaccgccaaaattgacacagcctgcgagtcaatccggagcatcctgacagcaggactgaaaccgaaattaagagatctggcggccgaggctggcttgacgcctagtcatttccaccgtgtgtttaagaagcacgtgggcgttacgcccggtcaatatgtagagagtcttgggcaaagccacctgcactcaccggaatcatcgccatcctgtgcttttcctgaaggtggaacgccgcgctcggcgttgggggataggggtggtgaggtgttggatctagattggaatactagtgagaagggggctggtctgtcggttgctaggggcaattttccatttcccagtggctggaatgaattcgatgctctgctggcatctgaatcggaacagacgtggatacctggcttatctattgaccctcgaatgaccttggcggatgtttctgatcggaccatatgattacgatatggatacttgcactggagacgagtatatatattcctaccaataataacggaccgaatggtggatgggaattttcgccattttactccgtcggatttgacatgcaacttgttgtattgtggcgatgcaacccactgatagtcgttggatcttgattcactgttcaccgtaactcgcaaatcacattggaccggtccagagccagggaccaactgaaacagttttgaaacctttttttaaagccaacgcatgcaccgtgcgagtattatacgagtaatacggagtatgtatatggagtgcatagtttagtacggagtctatccaaggttattgtatactattgggctccatataataaggataataaactagtagttcactaatgccactactttataagtcacattctaatattccctggtggcaagggataattatagtaattcaacgcctccaatgggatttagtggctctccaccagttggtccactaacgcgtgtcacagcgtttactgggggtggttctccccttggtggcaggctattttagggctttgtatggggatacgccggtacagagcacggagtactacggagtaccttcggacgcaatatgactgtcgcattagggacttggtagttatggacatttcgttatttcgttatttattcttcttcttattcgtttcttgcttcaatggcaataataagagagtacaggcttccccactgattgacaagatcggcgttactgcatgcataaaaagcattgtattttgttgtaacttgtatgcgaatattcgattttatcataattgcgtgcccccccggcatttaatctaattcccaacctcctttcccctccccctcccccgtcttttctcctgatcctagagcattctagacattcccttaccactcccttaccattcccttccaaggttgaccttttattctacacaatcgctggtttcgattattcttccgcataccattatctctcgccaacatgcacgtcaacaagagaatcggcagattcaaacaatgggctggagaacgcatgggcggggaggccaagacctgcctgtctgatgatttcaaggcaatggagacggagatgggcgtgcgacaggaaggtaagaagtggccacactccgtgcctgcagtgtatccatactgacaaccgctctctatctctaggcgttgagcgcattcataaatccatgacctcctatgtcaaggctatctccaagcgcaatgagggtgacgacaaagaaaagaccctcccgattgcccacctgggaagcagcatggtggcccacggcgaagatttcgatgggaactcggaatacggacagtgtctgatcagtaagttctgaagacgacctggggaatgcggcgaaaaaaatcgaatccctaacaattcgatcagtgtttggacgcaccgaggagcgtattgcgcgcatccaagagaattacattgcacaggcgacttcaagctggcttgagtccttggaaagatccctgactcagatgaaagacctgcaggtatgtttttggaccgaaggttaaagttgaaagtcaatattaacctgctcatagcatgctcgcaagaagctcgacagccgccgactggcatacgatacttctctttctaagatggagaaggcgaagaaggaggacttccgcgtggaggaagaactacgctcccaaaaagtgaagtacgaggaagctagcgacgatgtgctgcgtcgcatgcaggacatcaaagaagccgaagtggacaatgttatggacatgggggtgttcttggacgcccagcttgactaccatgaacgatcccgcgaagcccttttgcagctcaagaatgaatggattgggtaagcattgatctagcctttgcatcctcgtgtgcggtactaatactgaaacagggacagccaattacagccccctccccgtcggccaacccgtcctcgtgccaacactgcccactcgttccaggaacggtatgagccgctgcaggaggagtcgattaatgagactcgtgctcctattagaccagccagatctattacaccatactctgactcgcccccgcgagatgcctatgggaatgccagtgtctcgcgtcccgttctcaaccgaattcctacatttgaaggcccgtctcaactgcgacaagaacaagcgccagttgcatcacagtggctccagcagcgaaccaccagcgagaatctgggcgggtttggacgtcgaagcagcacccaagttgggaacggtcgagtctctgctgatccttacgccgactccgaagaggtcagctcatatggccgttctagccccgagcggatatttagcgggggcaggtccatatccccagcaacatctcacggcagtacgccatcccggagacctagcgcaaccaacttgaacactctcggatcgaagaaggctcctccgccccctccaccatctcgtgcgaagaagccccctccccctccacccaccaagcggacccttcttgcggcaccaaatgcgtaagaacgctctgaactttgaagtgcatctcacgtctgttcttgatcttgagcatggggttttggagtttgggagctataggttgtggcggtatctattcttatcattccgtcacggatgccttgagtgttacaggattgttctgtcctttccttgattgttctttctagtttgcttttcccatgattcccatggaggtctggaggattccccggctgctattagtctcaacgcagagttagtaggttgatgataaaagtggatacctgcgtcttctaagaataggtagcgaataggcaaatccattcaagtctttgttcatttataatgatgatcttcgatcgtgtcgatacccgttgacagccagggtggacccggtatgtctggctttacaatgtattgtcatttttattggtcattgaaatgaagacaattcaaccgattcaccctcattccatacacccaatgtccgatcataaaaccaatcctcttcttttataaccacctcccatagtagccctgatatcccaaaccggcacggtaccagagctgcgctgccccaagccacaattcagcacggggtcacgtgcctgctgactaacgtccgttgaaaaaactccttgccaggctgttgtcagtcctttgctctgagcacccagatttccccgagcctgtcgcgcaactccgttccctccccatctccattttcatccatccactttttgaacgcgccatcccaacgcgccttcaacttttgagcttcccttccaccttgccttaccctgggaatccgcctctttactcgctttctttgactcccttgtccctgaagtacccgacccccccccatcgcatcggaagctccgaccacggccccaaacatcacgtctgccatcgccaagcatcgcatacagtcgctcactgatcgcattcacccataattaggcctcccccacactgtcgccgcctctttatttcgaccacgatcgccacttctctcttgcccgcgcgatttggtaattgggaccaggtggagactgtgacttgccacaactccgcatcgactttgatattgctcaccctagatcacgtcgcttgctgatgaattaaaaaaatacacgcgttacgatggcttccttacacccagcgccaaacatggcgcctggcaacgtgagcttgccgtctaacctcacgcagcaaaatgtccaggagatactccaggtaagtttgtcgcattacaactacacaactcgttatatatcaattcgttattccctcgacgcgccttcctattacatgccgtctctaacgttatcgcagaaatacaagcaaatgcaagaacagggtgttcgccctgatgacccggaattcctcaaggctcacaacctacttgctgctattcaacggcaacaggctttccagaaacaacagcgcatggctcagcagcagcgccaacagcagcagatgaatggcgctactcctgaagctgccaatggctctcatggtaagttttgtcttcacctccaaatccaaggtcttctacagggttgacacatattcttacaggtcgcacgccctcgacttcctcgattgccgcacctaatgccccgaatgcctcggcggttgcccagaataagaatgcgacggttggcagcggtagcttttcaccagagcaactgtctactcttagaaaccaaatcttggctttcaagatgctgtctaagaacctcgccattcccccgcgtgttcaagaacagcttttccaaaaccagaagaagtcccaaccgcctactcctacagaaaatgttgctacagccgaaaaggtcattgaagctgccaatgacggcgctggtagccagcctgcagatagctcagatgccgaagtcctgactagggagtggtatgatgacttccagtctccatatgactcgctctccaagactattagctatactgaccacgccaaccgcgcaaaccgtgtacgcattcccgctcttttgccacctggcatcgacttggaacagatgcgcgaggatcgtgaggtcatactgtataataaaatcaccgcccgcaaagcagagcttgcccaacttcccgccaacctcggtgtatgggataccagcaaaagtgacgcaccaacatacgatgactccctcaagctgaaggccctgattgaatacaaatcacttaatcttctacccaagcagcgactgtaccggaagcagctccagagcgagatgttccactacagtaacctcggaatgacagccaatcgctcaagtcaccgccggatgaagaagcagtccctgcgtgaggcccgtatcactgagaagcttgagaagcaacaacgtgatgctcgcgaatctcgagagaagaagaagcaatacgatcagctgcaagccattctcaaccacagcgctgatcttgccaatgcttctctccagcaacgtacgcgctcgcagaagctgggtcgtatgatgatctcgcaccaccagcacatggaacgtgaagagcagaggcgcgtggagcgaaccgctaagcagcgtctgcaggctttgaaggccaacgatgaggagacatacttgaagcttttaggacaggctaaggattcacgtatctctcatcttctcaagcagaccgataatttcctcaagcagcttgctgcatccgtcaaggaacaacagcgcaatctggcaaatcgttatggcgaagcgcatgattacgatgacgagtctgatcaagagatcgcggatagcgaaaacgaggatgacaatcacaccgccactggaaagaagaaggtcgactactacgctgttgctcaccgcatcaatgaagaagttacttcgcagcctgacatgctcgtgggaggtactcttaaggagtatcagattaagggcctgcaatggatgatttcactgtacaacaataacctgaacggtattttggctgacgagatgggtcttggaaagacgatccagacgatcagtttgattacccacatcattgaaaagaagaagaacaatggacctttcctggtcattgttccactgtccacgctcactaattggaacaacgagttcgataagtgggcgcccagtgtgagcaaggttgtctacaagggcccgcctaatgcgagaaagcagcaacagcaacagattcgctggggtaacttccaggttcttctcaccacctatgagtacatcatcaaggatcgtccggttctcagcaagatcaagtggacacacatgattgtcgatgaaggtcaccgcatgaagaacacacagtccaagctcagcagcactctctcaacctactacaccagtcgataccgtatcattctgactggtactcccctgcaaaacaacttgcccgaactatgggctcttctcaacttcgtccttcccaacattttcaagtctgtcaagtcgtttgacgaatggttcaacacacctttcgcaaatactggtggccaggaccgtatggatctgagcgaagaagaacaacttctcgttattcgtcgtcttcacaaggttcttcggccattccttctcagacgtttgaagaaggatgtcgagaaagatttgcctgacaagcaggagcgcgtcatcaaatgccgattctccgccttgcaggccaagttgtacaagcaacttgttacgcacaacaagatggctgtcactgatggcaagggcggaaagactggaatgcgtggtctcagcaacatgcttatgcagttgcgaaagctctgcaaccatcctttcgtctttgagcctgttgaggaccaaatgaaccccactcgcatgtccaatgaccttctttggcgtacagcaggaaagtttgagctgctcgatcgtgttctgcccaagttccgtgcgactggccacagagtcttgatgttcttccagatgactcagatcatgaacatcatggaggatttcctccgccttcgtgggatgaaatatctccgtctggatggatccaccaagtctgacgatcgatcggacctcctgaagcagttcaacgctcctggatctgaatatttctgcttcttgctttctacccgtgcaggtggtcttggtctcaacctgcagactgcagacaccgttattatctacgattcggattggaatcctcaccaggatttgcaagcccaggatcgtgcccatcgtattggtcagaagaacgaggtccgcattttgcgacttatcagttctaactcggtcgaagaaaagattctcgagcgtgcccagttcaagctggacatggatggcaaggttattcaggccggaaagttcgataataagtccactaatgaagagcgagatgcacttcttcgaactctcctggacacggcagaagctgcggaacagatcggtgatcacgacgaaatggatgatgacgaactgaatgaaattatggcacgatcggaagaagaaattcccatcttccaggagatggacaggcagcgaatcgccaacgatcaatatggtcctggccaccgctaccctcgactgatgtccgaacaagaattgcccgaaatttacatgcaggaggataaccctgtcactgaagaagtcgaggttgaggtcactggccgtggtgctcgtgagcgtaaggtgaccaagtatgacgacggtctcaccgaagagcagtggttgatggcagtggacgccgatgatgatactattgaagaagcgatcgcacggaaggaagctcgtgttgagcgtcgcaggtctaacaagactggacgtgatggagatgactcttcacctgagccatcgattattgatgatgacgagacccctcaaaagcagaagcgccgtcgtggtcctcctcccaagcgcaaggccgaggaagttgtggaagaaacgccacaacctaagcgcaagagaggccgccagcctaaggttccggatactctcaaccccaccgaccgtgccaacttgactcgcattcttgacaccgtgatccagtcgttgatggacatggaggctgaggtgccaccagagggttctgatagtgaagagggtcccatggtccggtcaatcattgatccattcatgaagcccccgccgcgttcttattatcccgactactacatgatcattcaaaatcccattgccgtggatacgattcagaagaaggtcaagcgggccgattatcagagcttgagggaattccgcaacgacatccatttgctttgccagaatgctcgcacttacaacgaggatggcagtgtgctattccaggatgctaatgatattgaggtaagtttgattcttgtcgattatcaattattatactaatgatacaacagactaagtgcttggtggaattgcgacgactgacggaagaccaccctgagctcgccaactttgaagatcagtacaacggtgaagggttctcgggcgccgacactccgcttaatgctggcactcccggccagccgaagctgaagctcacctttaacaatcccaaccgggatagcccaggcactttacacggcaatgaatacggccttggcgagtgattgttcaacactgggctgataacctaatgcagccatcccacgcttcatatagcgcctgcgactcttcaagttgctcgtgcttcttcttgtcatgtgtaatccgaaaatacttttttctcccccacttctgtgccatctaggaaaggcgttttttctcgtgagtttttgttttcgacattggggatggacttccggaggatggcgctgtattgttccaagcgattgatttccctgggtgtgttgtcttgactgcatgacaaagatccgttttgtgcaagaccaccccttgtatttgatgagtatgtacctgcaagttaggaacaattcgaattgatttgaaccatgtacgttgtaatattatctattgcgagacttttacaattgaagacatacgtcatttgttttccaaattctgtccttacgcgggggcgcccaagatgctgcagatgctcaccgatctttcagatcacataaaggtaaggtatcgccagcagcactcccttctaatacagacacactcttccatttagtcctcacctcgcaactatgtccacgaacaaagacctagccggcaaagtcgcaataagtaaggtctacaaccaccccaagagccagtagactaacagcgaaacagtcacaggctccagccgcggcatcggcgccgccatagccctaaaactcgcccaacgcggagcagacatagccgtaaactacgtctccaatgccacggccgctgagtccgtcgtcgagcagatccgcgctcttgacgtgcgcgccatcgccttcaaagccgacgtctccaaggaagaagaggtgaaggccatgttcgagagtctgcaccgtgaattcggccgtctggacatcgcagtcagtaactcgggcatcgagcatttcgggagtctgtctgaggtcaaaggcagcgatatcgacgctgtctttgcggttaatgtcaagggacagtatttcgttgcgcagcaggcttatcgcttcatgggagattacgggcgggttattttgacttcgtctatttctgccgttaaggtgagggctagagttgtagttttggtggtttgttaggttggagacggagctgacttctggtctgatttagggtgtccctcgtcatgctgtctacgctgcttctaaagccgctgtgcagggtatgaccaagtgtctggcgatggactttggtccgcgaaacatcacggttaactgcattgcggctggcggcgtcaagactgatatgtatgctgagatgtcggctaagtatatccccggcggcgacaagatgagtccgcagcagattgatgatgtcttgagcaagtggtctccgatgaatcggcctggggaggttgaggatgttgctggggttgtgtctttgattgctagccctgagtcgcagtggttgactgggcagacttggcaggtttctggtggtgcttatatggtgtagttagatggtgtaaatggttggaatgggactaatccaatctgatataaccagggatatcacatgatcatcctaagctttgttcttgatctctcgatagtcacgaatgcggatgctagtgtctacctggggatcctaaatatcaacatggcactacacacaatccgaccccttttcaaaagaacctctagctcattatagatcctatctgacctacatttggagatcaatcaacaatattcctttgaagtccccgtttgctccaaatacctcatcctagcaggcgacatcggccgtctggaagactacaacagctagcgtgccttcctacaaacctaaacatccaaattcgagatcgtattcttagcccttggaaaccacgaattctacgaaacaaccttcaacacaggcctcgaaaaagcaaaacagctcgaaaacgaaccctgcatgaatggccgccttgtactactccaccaacgtcgctacacatccgggactccgacgtgacaatcctaggctcacactctggtcccacatctcgcaggaatcaaacgaattagtcaattacaggatttccgatttccaaaagatcaaatattggtccgtcaagcaacacaacgaagctcactactccgacttgtcctggttaaggggtgagatcagagctcttcgggagagtacacaagaaaagcggtctgttctggtggccacgcatcatgcaccatccctgcagcgcacttcgagtccgcagcacgctgaaattcgtggaattgtgcttttggaacggatttgctggagttgccttgggatggagttaaggtttgggtgtttgggtataccaattatacgactcagtttagggagagggggattagggttgtgagtaaccagcggggttatgtgcttccttggaaaagtgaagaggggaagtttgatgttaggaggatggtatgggtacgattgaccgatagctacagaagcaagaagcacgagacttggacgaagatgaggcttaatggaacatggctcccgatatcaagccggacagacaaggcaaaaaactacaggtataacgtcacactgattctaccttagaatatcggatgcacctggcacagtattcagctgtccaaaaggagaattgaaagaaggcactactgttgcaagtctcatcgtctcactattgacggtagctacgctgaatacacccggcccaaccgcagatgctaaaggcatccggggattatataccacggcgtgggtctgtttcattcagaatatggggatatcagctattccgtggcttctcgtctgcggtagtaatactgcttcttaacgaactgttacagcttcgaaattggcttctatgctttgcgcaaccctaacccaaaccgcgctaggcctaacacggatagtatcgatacagggactgttacgtcgaaattacgtagtactatagtttcaaaactactttgtactcgtaagaaacaatggattgtcaaatgcagggttactagggagaatcgcagtgaattgtagacaaaatcagacaatgaaatacaatatagtgagaggaacccaattcgagaaaagcagaggaaggataaacggttcatgccttcatagcaagatgcgcagtttcccatcccagcagcgtattgtcatggaatatagtataaggatgagatgggcctaaaactcgttgttccttgagcacgcaggttcgaagcaaatcaattgctttagtatgctggcctgtagaattccacgtgaaggctaggttagccatgcccatcaacgtgttgggatggtccgcgccgagtttcgtcttgcgagtctccataacctgcagctggagctgctccgccttcttccatcggccctggctccataatgtcgacgctaggttggccatactcagtagcgtatcaggatggtccataccgagttttatcttgctcgtctccataacctgtagctggagctgctctgcctcctcccatcggccctgattccataatgtcgacgctaggttggccatacttagtagcgtatcgggatggtccgcgccgagttttatcttgcgagtctccataacctgtagctggagctgctctgcctcctcccatcggccctggttcctatatattgacgccaggttagccatgcccgtcagcgtgttgggatggtccgcgccgagtttcgtcttgctcgtctccatgacctgcagctggagctgctccgcttcctcccatcggccttggttctgtaatgtagacgccaggttattcatactcgccagcgtattgggatggtctgcgccgagtttcgtcttgcttatctccgtaacctgtagctggagctgctccgcttcctcccatcggccttggttctgtaatgtagacgccaggttattcatactcgccagcgtattgggatggtctgcgccgagtttcgtcttgcttatctccgtaacctgtagctggagctgctccgcttcctcccatcggccttggttctgtaatgtagacgccaggttattcatactcgccagcgtattgggatggtctatcgggatagtacgcgccgaatttcgtcttgctcgtctccatgacctgcagctggagctgctccgcctcttcccactgcccctctagttggtagacttctgctaacattgcagtgctatcaagggtatctttatcttcggcgccgctaatcttcattctttgcttccttgacatagctgccatatcctctgcaaccgaaatactgccacattccatcgcataccacgcccctttatagagtagcgtagcccagttccggagtgagtcttgcgatttcggtcgatgtgccacagctgacctaacatgtggaaacagtgaccggcatctctcccaattttcatattgaccggtcgggaattcaccacatagattcttgataaaacgttccttccactcctcctcctgaccatagtttttcaaccatatgtgtactgctagctgcacaagccgatgcattgtgaacaccatactatctttatctgaagtgataaaagaatagtctttgagaatcacaatatcgctctcaaaatcgtcatctacgtcaggttcagacgagtgatccgtatcctcatcacttgatctgttcccaatgtcttgcggagaacttaaaggattatgggttttgtcttgcacccgtagaagaccctctgggattccctgccggtcgaaaaagctcatcagagacagcaaatcagcggcagactgcctgatccgtcgaatatggtcgaacgaaatttgccaagtcagtaggatcgagttttttgcctcccagtctcgatcgatgtattttccctcgtgattaagaagtcttgcggcttgccgatcaccctgctgaagcttttctaggtattgcaataccgagcattggggtgcacggtgggtgatgtagctagcggcttgcacaatcgcgagtggcatgaattcgagttccttgactagccgaaccaattcctcagtctctgcaaaatcatctagcttcttccgcattagaaccagcgcctcggctgcattcataggttgtatatcgatcagatgtttctcatggccggcgagctctagagctacccctttattccggcttgtgacgatgatggaaccattcgagcttgcgaaaaggtaccttagcggtggctgcgttggggcatacctcgggggttctgcttgggcctctgtccgagtagtcaatggtttgcgaaggagctcatgatcatcgacattatccaggaccagaatccattttccgatcttgccatcttgcaaccagttcccgaagagttggaaaatattagagttgcgatcctgacgcccgggaatcttagcacggtcggcaaggttgcgcagactttcctcgcagcgcgcagcattactcgcgtgaacccagaaaacccaggtgtcaggcgattcctgtcggatttggtggcagtattcgatgacgagtcgagatttactgtcgcaaagttagacttgaacagaccgctcaggactatgttctcacccaacccctcctatgccaaagataactattctagatcccgggatcgaggatcttttgtggatttgagcgaggagttcattgcggctgacaaagtcgggatcatgctggaatggcaccgtccacagtggttccgggcgaggttctggttggtctaaggtttcgatggttaggtcaatttgctcttccaaaaaatgaaggtgattgattacctgggtgctggtggtagtgcgtcccaccatggtattcgctgttgttactattgtccacatatcctgcaaacacttttccaccggattctgcgttcacgccagaaatatgttgtgtaatggggactcttgacatggttgctctcgtcctgagcttcgtaccacgattgccaggcacagttaatccaaagaggctgatatgagcagatggtttttaagaaggaaaaagaatagagagatgaatttctagccaagtgtttgccaaagacttatataatcttatgccctctttgccgtggtctagccccggtaagcatttgatccgtttcgcgggggagaactgcattcttccctacttggctttctttcgagtcgatcaatttatacagaatcaaatttacttcaagccaataaaagtgtagcaccaaattattgtgatctaacttggttcctgtgatatggactatataaagttgatacgaaaccatcttgaccgaaaaccagcatgtccaggcaatgtatgccggttgtcctattattaggtcttctaccaatgatttgcagcgcatcccgcgctatacgaaaagctgcatctcgtatttcgttgtcacatcagctgcacttggctgaacgtgttgcattgcaattggtcgtcagtaatttgaaggctgatttcacccaggtgaagggggttggaatcaggtcgatcgtttgagcccattgtatgtatgttgcactcgtaaaaccattcgctgataggacaacgttcctaagatactagcagccataagccgcaatcaaatctagatcacttcagacgctcgtgccctacatccataataaattggcatattctcatgtcagaaacatctggcaggaaacaaattccctccatatataaaaaagcaaagcgcccaaatctcaagatctttttatactaaaacacctgcagccttacggtacttcacataccgtacaaatggcaacactcggtatagtcactggtggtatagggattgctagtgcgacaacacacagcatccacaaactgatccagactatcgatgctatcaaaagtgcaccaaccgagataactaatctcaagaatgagctattggccacggagcaggttctttcggggttggaagacgcaaaccagagctcgcagcttgaactccttcctttcaattccagacagactttgcagagaaccaatatactctgcaaagatgcctgtgacaagtttaaggacaaattagagagctggaccaagcgttcggatgatggcgtcagtatgcgagatcgctttgggtttggcattctccgtcaaaaatctgtcaagagtttatgtgaaaagcttgaacgctgcaagtcaaatgttaacatggcagttggcttcgcaacaatgtacgtgtttccacatgtatgaaaaccaccacaaagcttgataggctaacaactttgaaagtacaactttggccttgcgttctaccactaacgcaatgcaaaacgacttccaagccagagaaaatgaaatctcccaacaaatagtcgagattgagcagcaaaatgcggtagtacagatggatctagatgactccacagaggtatcgcttccaaacgatcaggagcatactctacttgtcgaccaactcaactatcaacgtgctactctggaggcctctcaggaattcatgaaagatctgcttacgcaggctagtcaggtccggagaggacaaaggataactgatgtcgaaatgagcggaaaaggaaaggccctcgttggaagagtaggcttcgagaatgacgaaggcgatctttatcaggagattcacaacgtcaaagctacaactggtggcaagggaatagtaggggtggttaaaggattggacatcaatgcgtttttcaaagactagatgaagtgcgtttaggcctcgaagcccatcctcgtctgagtattctttgaaagagagaagtgaaagttcactaaattgaaggaagaagctctataagtcgggggcttgtaacttcatttctgtcttctttttattgtgctttttataccttaatccacaagctatccacccgccgcctctgtgagatagtcttcgtagatagacgccatctcctgcggcagaagcatgactatctttagagcgcacgtgtgcacaacaagaaagacgctattcgaattcaagatagaaaattgtcaaggagaggttgggattgatataatcaattcaacaacaacacaaactaagtacaacgatttgaagcaaacatttaaagtcacaaacaaaaacagaacatgggaaagatttcatcgcatctatcggccgtcacatcaaggttccagcttgctatattgaccctgaatcaatgaaaggctgacatggactcgccgatgatacatcatcatgtctcatatctatcatgaaggttatctctatataccagcgtttgtatctgccagtgaagctctaatttcacatttgaagggctcacccttgaaagttcccagaagcgcgtgaaaaacgtgctcaattaccacagacttccgttcgcggcatagacatactcagccagcaacccacccgagatggcaacgccggtcatccagaagccctgcgagaaccacgaccagcagctcgcggggtccttgagatcaacgaagaagaccatcgcgcctacggacaggaagcagccacccacggtgacggaaaagaaggccatgctcatgttggagtagtacccgcaagcaaagagacacgcactcatgccgaggaacaagacgaccaggaacagacgcgcgtagctctgcaggagaaccgcggtgctcttcacgccgactctcaggtcgtcctccagatcctggtgggcgtagaccgtgtcaaagatgatcacccacaaggacgaggccacgaacagggacagggtagatttgtcggcccacggctcgggcacacccatggccgcgcttccaatcatgataccccacgtcagacagaatcccagcaccacctgcgggaaatgggtgtgtcttttggcgaaggggtagtaagtagtgccgaagatgttgggcacagcagccagggcgatgctgctgggaagaagtaggaggaaagaagcagcgatggcggcctggatgcaggtgaagatgaaagcggcggtgagcgagatggctccacgggggatgggccgtgtgcaagtgcgcgcgaccagcttgtcaacgggagcatcaatgaggtcgttccaggcgtggctggcattgttgcagaagaagcttccacccagcagaatgagggagacacgcaggacttcttcgacggaagacttctggacgctagcagcgtggatcacgccgaagaaatgagggaagaagatgatgaagaaggcggccggggggctcagacgacagagctggatgtacgggacgaaatatgaagggagatagtccacccatcctccggcatgaacgccaccgtattgctttgacaacgagtccttagacttgccattggctgtgccattgagctgctctgggactcccatggtgaaagatagcaccccggtgaaagagatgcaaagagaaagctctacaaactcgggggaagactattattgaactcttgagagcaggaggggcccgggggagataagacacggtatatctctcaagttctcgacggccagctcgcactttgcggcaaaccgtacccacatggttgtgcaaaagcaatctccgatagccttgctagtgtaagatctatccggatgaagctatatatgggtctctgttgggctgtgcacagtatctgacaaacgagtaggatcctcatctctgaacccccggggccatttactaaactggatccactggtggacagctaagagtgctcaagtggtataagttcacaaatacgaagtatacagtcgtggggatccacacatgtgcattgatacatgaaattccaatacatgaagttccggacggtaccgaacggtattggtcttatacgaggcgtatggatctatctgcatgtcagattttaaccagattgatatcatggagttattgtctgttcttggagtttgacaaaagttgcaaaaatgacattgtcagagtttgcgttgctctccaaccctacagccatcaaggtcgtcattgtagcatgcattatcactgctgtgtactgggtgctccgaagggcatatccacgaccactctcgggcatcccgtataaccaccatgcgacccaaaccattatgggagacctggccgagctcggggagaggcagaaagacatccagggaatgcggccttggttcctcgagcaggcccatcgccataactcggccatcacccagctcttcctcggaccgttttcgaagcctgcaatcctgctctcggactaccgcgaggtcaatgacattctgagtcaccgtgatgcggttgatttcaagcgagggaagaaggtggatgtattcagtggtctcctacctcatgcacacccggctatggaaactttcgatccacgtttcagagagtctcgtgatctcgtccgagacttgatggcgccgtcgtttcttaataccgtaagagctcatgtctccccaaatcccttctcaaaagcccatactaaccttgggccggatgataggtgaatgcacctcatacctacgtggtggcctgcaacttgctggagctatggcgactcaaatcccgatccgccaacggacaccccttcgacgtcgtgaatgacatagtcgaattttccttcgactccatcctgagtgcggcaactggactgggcccagaaggaggagatatcaagcggcaactctcatacctgcgcgacatggaagaagccggaactgacatctccctgccggacagtatgaatgacgaagtgacggtattcccatccgcagggacatcggacaaactggctgccctcacactgaacgaagaatctctctggaagggcttctacatgccctggcctcgtctctaccacgccatcaacaacctgcggccctcggtccgacattcaagccagacgctgagaggatacattgaatcccaaatcaagagggccattccccgattgaccaaggacggaaagcccgaatgtgctcttgactatgtcatcgcgcgcgagatcaaagccgctgaaaaaaccggccgcaagccagtgctcgatgacccacggatccgcgatgagatctgcggatacctgatagccggccacgacacatcgaccgggtccctgatctggttgatgcgccgacttctctcccacccagaggaacagaccaagatccgggagaacctgcgagagacatacagcgcggcatgggcagagaaacgtctgccaacagcggcggaattaatcaaacacgctccctacctagacgccttcttagaagaggtgctgcgagtgaactgtcccgtcgtgacgatcatggttcagacgagaatggataccgccgtgttgggctacgctgtcccccgtgatacccaggtatttttgaacctcactggcccgtcgctgaatatgccgtccgtgtccgtcgacgagagcagtcgcagcaagacatcgcagatgcataagccggctcgccatgattgggatgaccttgatcccaaggcttttcttcctgaacgctggcttaagagggatgctgaggggaagttggtctttaatgcggccagtggtccaacccttgcttttagtgcagggaaccgaggatgctgggggaagcgtttgggacagttagaattgagagtcgttctcacgattcttatctggtcggcaaagtttgatgttcccgagaagctcgtttcatgggaaacgtacgattcattggtcacggcgccgaagcaatgtctgatgtctatgacggagatttagtagtggtatttgatgtaatttagacagtgttgatttccattctagactgactcttttctaatgttataaaatgcgcagaacttgaaatcttcaaagcttgaattctatgagggcgttccactagtccaaccaccgagagatgttaacaccatcccacagcggacacagccagttctccacattttccactccatgatcagagcaagacttctctgccatagcagcaatgtagggattaaattctaagccggtaactttgccatctaggccgactgcatggctccaggccagtgaaagaaagacccacgtatcgagaacaatgcggaaagtttctatgttgcagataaccacacgtggcgttgataggtcgagaaaagtctctcttagcttacacaggagtgaaacaacgatgcaagcacatgcacgtccgagcacattggggctattaagtggagtcttataagcctatgaggggctctcggagggagctacgggaactcgggagtcaatcgagttcgtatcgggaagatcttttgcccagaactattgtgggccgtcggagaacccgccaggcgccccatcggaaaaaccccagttttgcctggaagatacgggcagctcgcttacaccatttgtttgttctgatattggttacgtcgacacctggccaaccggggctttcaggttggtacccacttagcttgtttagctacagattcaggcggctggtttcttacatacggatacctccgttggaatgtcggttttacgattctgttttcgtgttgtattgcagtcacgatgtgagattcatggattagattgacaacgtgccggttctcggcagtgattgatggcgctgacatccgatatgggctgatggaagaatccttatgctattatgctattatctaaacttcaagttcatctgcggtcttctcttgacttaccacttctacatccagttcaggaacatagagacaaaacattgctataatggcaccctccgacgcagaccaaatggtgtactcggactccgacatccgggtccatgtgtgagtatcgacgctatcctgtttgtggctatctgtttgtgactcaactaatatgactgctctttccataggctgaaaaacgccgtgaccggacgcctcgtccaccatcctgatcgctcctttgccatcgaagtgactctcgacctggtaaagggggccgacttcttctgccacaaaccgcctatgcacttccatgtccaagaagaatatatcgaatgtactcaaggccatctgggcgtggagatcgacggcaaggaagtagtgctgacggcaggtgatggggcgtacagcatcaagccgtacaaagaccaccgctcgtaccctctttccctagatcgacaagaaaaaggaaacacggtggtcaagttcctactatcgggcgagaagaccgacagtgtctttgagctgaacccggttttcttcgagaattggtaccgctatcaggatgatgtggtggtcaacggggccaagattgacctgattcagcttttcagcgtatgtcccccctcctccttcctactcctatcctcttcaatgcttgatttctcatgaatacagacatttgacgcgggtggcacgtacatctctctcccctggtggattccttttggacagaccgtctcacgcaccatgggcctcgtcgttggaagatggctgggcggactactgggttatcagcctttctacaggaagtggacttcggattggcctctggcttgccagaagatggaatcttcattttttcaacggcgatttgccgatcgctcgaagatggattgataaagcgattgataaagcaatttataaagtaattgatacatatcattcactcgtttgtgaaatagccgtcctagaactagactcaagacttcaatctcaatgcaaaatagccgatcatatcatccaagaaccgtctcaaaactagactcgacaatttaaaaaggcaaaatacccgaccctccaatctaaaatttattctgaaatagtcttgagaatctcatccacattcgcaaaggcgagctcttcgctggtctctttccagagctgctctgagatcttcttcccctcttcgctgtagataatcggtgccaaactgtaaagtatcttagcaatagctctaatcatggtcaacatagggataacttacggcaccaatttctggaaggacaggaactcgccatgggtctcctcgccatggttgacagctgcatcggtgaccattcgggctccaacagcagcagtgttggccatgcggcgcattacgatcttggcgatagctccggcgaaagtcttatcgtgctcacggttgaattcggaatcgaagacagagcccggcgaggtggcattgatgatggcaacggaaggcgggacaaccgaggccagatgtgccaggaaaaactgccctagaagcttagagaccatcatgcgatcgagggggtcaaccttggtcttcttctggtcgagcgctgccagcagcgggaagcttttcttctccttgaagggagtccatgcggcgacctctgatgagacgatcgtaatgcggctcggacctccttgggcagcgcgtttttccttgacgacagggagcaggaggattgccagcagggcggtggagaggtagttcacctggatcatctcatcatggcctgtcttggcgttgaagacgcgcgtggcgttggcaatgccgatattcaggacgacaatgtctagtcgggggaggctcttggtgcgctccgcaaaggcgacgacagagtcatagtcggactggtcaagcttccagacctcgatgctatcgtcggagagatcccggccagcggctagatcctttttagccgcctggcctttctcgtcactgcgcacagcgagaatgagcttgctaagtcccaggtcgaggagctggcgactggtctccaggccgacgccggtgttggatccggtcaccagggcggtcttgccctccaggctgactcccttgaccggggcgggtttcacggtaatctggttgtagaagaagcgaggcaggctggcctgcttttccggagtcacatcgaatttggaccccatttcagcgaattgaaagcggggtatcagctttggaaagtttggacgcaaggtgtgctggggaaaaaaggtgcccaggtggcgtgttttgcctcaggcacgtccttatcgatagaaagatttgtggtgagaaataggcatctgtgaggggtgttgaagagttactgtaatttgtgagagttgaatgaaagaaagtgagagttggttccaaggctgagagtctgggcccagtctcgaatgattgtaggatcgatctaccctaagccaaaaaaggaaagcatttacttgtatagattagactagtccgtattctgtatgaagccaggctatcgattgatatacgtggtcgcatgtccaacgtgctcaaatatgtgggtcacccgcgaaccatagcagcccgggaggcacccggccccgggggggagaagggggatcagcagaaggccggtgggaggaaaagtagaaatccgtatggacccgctgtaattaattaattttatttgcttatttgctgtatcgtactgtaattcatttatctgatctcttagtgctgatggcccccggggcggtgcataaagtgagtctatcttcgggaatttagtcctcggatgcgtgattgggaacaagctatgggcagagctactgtccaatgcgcatcgtaagattggatggcgccaagtataaaacagattggtctcccaagccatatctcaccacggcagccatttcaggtacctacagagatcatgcagctactgggtttcctgatcggggcgcttgcagcggcagctcaagcaacctccacgagcaatgtgaccaaattcacttcctttgcgcagaacctcgggctgtccgcagccaatacacgtgctttggcagcgcgatatgcaaaggctgacgactcggttgctatcttgaacgttgcatgtttgactgcgcagggtgtgcttggcgctgcaaatgttgatacatcgcctctcaaccaaactattgtggatgtaaactggtaggttgctatttatcggacctttgtatgttcgagctttttactgaccaatcaatgaaggtccgaatcgtgttttgcagagccgcactgcatcattcagcccgaggtagcccaggacgtttctacggcggtgaaagtcataggtttcttccaggtgaaattcgcagtgcgcagtggcggacattcgccgaacccaggatggtccagcattgggagccaaggtattctgatcgatttgtctaaactaagctctgtcagcctgtcaagcgatggcaaggtagcgagtgtcggtccgggtcttcgctggggcgaggtcacggaggcattgaactcagagaaggccgtggtgctggggggaagactgccctcggtgggagtcggtggtcttattctcggaggtaagtaaaggtgtctattcatggacccaaagatgcagtctaatcaggagttacaggaggatatcatcacctctctactcgctatggcctagcggcggacaatgtgcataatttcgaggttgttctgtcaaatggaacaattgttgacgcgaatgcggagcagaacaacgatctattccgtgctctcaagggaggtggccccaacttcggcatcgtttctcgttacgatctaaacactgttccggtctatgaagtctgggcggaaatgaggtattattccaccgatcaagctcccgccgtcctggatgcctttacggagtggcagctcaacggagcctcggatgtcaaatcggtcgtggctattgatatctctttgacctctatagtcattgggcttgtttactccgagccggccgtcaagcctagcgcatttgcaccattttatgatctggagccactgtctattccggtccccggaatgaacaccacgtttgtcgttatcgatgaactcctggcatccgcatttcccactgcgaaggctcggtaagtaattcatcaaatcccgctccctcttcagacagaactaatgccttcccagacacgactatcgcggctgcagtacccgcatcaacgccaacttgacccgggatgtctacgactactgggtggagaaggcccaagcggcttaccaagccactggtgtcaaccaaaccttcgctctgcaatacgtgggagagaatctcatccagaaagggattgagaatggtggaaatgccctgaatatcccatctggcccccagcaatgtaagactcacacttctcatctgatacgaaaccgtcctaatgtcagctacagggtggaccaccattgtggactgggaaaacgaggctgatgatgaggccgcgcgatccgtttccattgagacgacaaagtactggaagaaactggccaaggagcgtgggttggatgtgtccttgacgtacatgaacgacgcctcccgcgaccagaatcccctggaatcctacggggcgacaagtctaaagcagctgaaggcaacttccaagaaatacgaccctacgcagatgctccaaaggttgcagaacaacgggttcctgctttcgaaggcgtagggaattccagccccggggtccgcctctgtctgcactactgtataggtctcattaaagcgaatttattgggtgtacatggaatattaaaaccatatctactagaaaaccaacaaccaatcgcttcaaatgttttcaatttcccttggatacttcaatattccgaaattctgcctattgggtacgtaatagttccaaggttgccacggacaatcctaatattcatgcacgagcgagacaatctatagattccagagcactgactacacgaactagttcatatagtacttcaggtctttctcagcgaaaaggatcgtactatggtgccccgatcaatatatcagcctcaagcctgtgcctttcattggctctgccccctatcagcgtacttattgcgtgctactagtacccatttctttgcataaacttggaagtatatccatttgcacgcatgaagtagtggtaatatagataggtacggagtgaggcttcaggtattattacatacgagtactttttaataccactgtatattacacacaaccagtttacaatacatccgtggggcaaatgtgataggtcagcgggtagatctggaaaagatgcggcccctgaggcatccagtagatcttgcttaatcgaatgttggccccacgaggtaacccaaggctaatctaggccaaccgtggctgagaccttggaactgagatgcattccttcgcaatccttgcaatctatgtttcaatttcgcgaaccggttttatcagggaactgcggcgggtggatacatcctagcgttgcaatgatgataataggtacctacaacataagcagtaggagtaatcacggcaatacgatacccttgcattgccggtgtatctgtaaaggagttttcccgggcaaagtccgcgagtgtgataatgatagcgcactatgcagatacgatgttagcatcgacggtcttcatagtaaatgaggattgattctttggacttttttcggcattccctcaatcttgaaagtgctttctttgccttgtccattatggactctctacatgtgcttgctgcgaatgcggcagagcggccgactatccttgttgctctggtcttggtctttctggtattggggctgaagctatctccccggggaaagcagccgccatatcttagagagagaataccatatgtcaccaacactattcaatatttgacagacgtgggaacgtttttgaatcgagtgacgtaggttttatatcatttttattttctaagaattatctaacaacattaagaacaactctggacaagaccaaaagcaacattgtcaagttccatgtcggtccgataccagcatacattgtcaccggcacgaagaatgtgcaaacagtatttagttccccgaacatcctagatggcaacttcctccagcttatgttgatggagcgccactggggaatgtccaaggaagaaatcgccaagtttgcaaacgacaaatccggtcgactgaaggccccagccccaggaactgagaataccccagctgagaagagattctggcgcggtcacgaccacctgtacgctgagtacctcagtaaccgcacgtatgcggatgccctcgccgattcattctactctctgttctcgcagcgtctggatgagcaatcgacgacggaatggagcaccgtcaatcttttcgagatgctgaagacctcgatggctgaaagtgccattatctcgctgtttggctcagagatcatcgatttaaaccctggtttcattgactgttactgggagtttgatgaaattgccggcacgcttgtctgggggcttcccaagttcctgcagcgacggtcggtagcgataaaagatcgtctacatacgatgaccaggaagcacatcgattccgcatgggaacactttgactggaacgggcccgatgctgagtccaagtgggaaccccattttggatctcgtttgtcccgggagacagcaaagtggctgtctgaagggggtttctcgaaccaggcggccgctggacatacgctggcttcgttatttgggtgagctcttcgtgatacttgtacatgatatttgaaaaactgcgctaacgtttatcaggctcaacgggaacacagtccccgttactacatgggcgatgatcgagctgatcaaggaccgaactctgtttgaggctgtgcgcacagaagccatggaagcctatatcacggatactaacaccggagccaagcggatagacgcacaaaagctcatcaatcttcctctgctgcagtctctctacattgagattatgcgtctgcatgtatctttcaacgtgacgcgcaaggtgatgcagcccatccaggtagacggatacatgatcgagaaaggggccttgttacagacctgctcacagattgcacactacgaggacgctgtctgggccacctcggagcatcccgcctcggaattttgggcctggcgacatgtacaatatgtagattcgcgagatgactcaactggggagaccactcgccaggctcaatttgccatgaaggggagaccaagctcgttcttcccatacggtatgtttctccttctatcctacgacgccgatactgactggcttatcccaggtggtggatatgtgatgtgcccagggcggcattttgccaagcaggagattatactggccattgcagttttggtgacgaaatttgacattgagtttgatgaatggctggactctactgggaaatcctcggacaggccggctcaggatgattccagatttgctggcttcatcgctatgtctccggatcgggagatgagaatgcggtggaaaagacggtggtagtatctccactaaacaagatcgaaagatctccagggcttcaattcattccaaggttgaatatattgaatatcattgaaacccattttaagaacacacatgtgcatgcaagttatgcatacagcaaaatgaactttttcctgctccaattgtatgtcagaccgctggcgatcggggacgaatgtctctccagtgcgatacaattgtgattgtgaccgagaaaatcactccagaagacatccggcatcaagcgagtctgtgggagctctcttatgctgatagactcactatcctggattcacgtgaaaggagccgatgctccgatgccgtcgcgtttgagcccctgcatggtctgattttggaccatcttctggactgcgcagaaaaaggaatatcgactattctcggcatcgcacatcgcacatcgcacatcgcacctcggtgcgttctagaagctgagcctgcaatacccactgcaggtccttgataccacaccgttcgacctgttggctcacgcgcggcgcaattttgccaaggccccgaccatgcgtgagtctctgtgcgaaggcgtacgctcgatgtcggttgatggctacaccgaaggaaacattgacgaggctgtcgcatctgctctcctcatggatgcgtatccctcaagatcgatcccccctcgttgaacatgctactgacttctcaggattctccccggcagtcttgataaaaaagctctatggggagtggtggtctgcagagcgagaaggcaagggcattggccgctacgaacgcgcattgtcgcggttcaagcagtattttgcgcagctatgccagagatcatcgtcgagcattcgaaggccacgctcaaccgcctctatagccaagacgatgagaatgcgctgcggtcctctgttgtttgttttgtttgtctgagccgccttgtgtgacacgtgtgtcgtgatctttggacacgtgatctttggacaacccagccagctcgggctctaccatgtcgacgtccatgttaccacgacaaccagaatgaagaatcgcatgtcccaactccgggcccttgcaattgggaaagtatatgttgtagaatatccctccggatcataagttcgacgccgttctgaaacttattggcgacagcactgttgttgattcaccccagatggcgcgcggaggaggaccgggttattggtggatttccgcctattccgaacttcgatcctctttcgcagatggcgtgtggggttcacttcagcttctttgggagatttgtttgggaacccctgagtctcctttgctacccccttaagttggatactagcggcatggctatgaatgtgggctcaatagaatgaaccggatgtcaatatttccgaacatgtctcacgccaagcgactagtgaaaatgattgaagtgaataatttttgattacttttcgagtctagcctttctcgattgaatattcatggtcagctatattgtagtcaattactccgtatagctcctcgtaggtaccttggatctcgattagacttgccagaaccgaagtttaaccgcaggagactgaacttcgccctggatcagatccgtggaattcgacatggccacgcgtacgtacctggggatgacgcggtcgcccggccatggacaagttttaagcttagatcttggatatatgggaataaaccttagccgacggcatcaaactcaaaaaaagttaatgtccttctcgtccatgactggtccttttgaggacatgaggtactccgtaacccttaattcggaaggctgaattaaactacacatgctaggctatggggaatgacccatttcccttcacgctctatctcgaacctagtctgagctgcgccttgtgccggtgttagatgatgacgactgagtatccacgcctatcctcgattcccggtcaggtttcatggtttgattgcaggcaacgcaacggcttaaagcatgatctgcgctttagttactagaaactggagccgttatgtagagtacctgaagatcttataagtatagcctctggtctttccattttattttcttgacacttatttttccattttatatctattcatttgatatacctcgacatgcgcgtctccttgggcgctgctgcagccctggcagcatcagcaggtgctacttcccttgctgatgtctgtaccgtctcgaatgtgcaggctgccctgccctccaacgggactctagtgggtatcagcatgatcccctctgctgtgacggccagtgctgtctacaatgccaccgctggcacgggaagcaccgagacttatacctactgcaatgtgaccgtcacctacgagcacaccggcaagggagactccgttgtcatcaagtatgccttccccaagccctccgatttcaagaagcgcttctacgtcgccggcggcggtggcttctctctgtccagcgatgcaaccggtggtctcgagtacggtgctgtcagcggtgccaccagcgcaggctatgatgccttcaactacgcctacgacgacgtcgtcctctacggcaacgggagcatcaactgggacgcaacctacatgttcggataccaagccttgggcgagatgaccaagatcggaaaggtcctgacccagggcttctatggcatgtcttcctccgccaaggtctacacctactacgaaggctgctccgacggcggccgcgagggcatgagccaagtccagcgctacggagaggaatacgacggagccatcaccggagccccggccttccgtttcgcccagcagcaagtccaccacgtcttccccgctacagccgagcaaaccctcgactactaccctcctccctgcgagctggcgaagatagtcaacgccacaatcaccgcctgcgatcccctcgacggccgcaccgacggcgtcatctcccgcaccgacctctgcaagctcaaattcaacctgacctccatcatcggcgaggaatactactgcgccgccgaaaccagcacctccctaggcttcggcttcagcaagcgcgccgacggcaccagcacctccaccacccccgaacaaagcggcaacgtcaccgccgagggcgtgaaagtcgcacaagccgtctacgacggcctgcacaactcccaaggcgagcgcgcctacctatcctggcaaatcggctccgagctcagcgacgccgacacgcaatggaacaacgaatccagcaagtgggagatcgacatcccctcgacaggcggcgagtacgtgaccaagttcatccagctcctcgacctcgacaacctctcggacctcgacaacgtcacctacgacaccctcgtcgagtggatgaacatcggcatggtccgctacctggacagtctgcaaaccaccctaccggatctcacgccgttccaagcctccggcggaaaactgctgcactaccacggcgaatcggaccccagtatccctgctgcgtcgtctgtgcattactggcagtcggtgcgcgccatcatgtacccgaatctgtcgtcccaggagagtctgaaggaactcgccgattggtaccaattctaccttatccctggtgcggcgcactgcggtacgaattctctccagccgggtccgtacccggagaataatatgcagactatgatcgactgggtggagaatggtgttaagccttcgcggttgaatgccactgtttcgtcgggtacttatgagggcgagacgcagatgctttgccagtggccggcccgtccgctctggaagagtaatagcactttcaagtgtgttgatgatacggcttcgattgagagctggacttattctttcccggctttcaagctgcctgtgtactaggttgtatgtacaagggagctttgagtatgccaaggatgtttctctcgcttgaggtattttgggtttgagatgatcagccctagttcagccctagaagtctgttttgaccaattgggcattatactctagttaattatattctgtgaatgcctattatttctatcatctgcttcgtcttatagttagtgtggtcttgatcattaagcaaagggttgagcactgcctcaatggtgtcccgtcaggggtcagtttttgaatgaatattattagacccattgcacaacattatgcctaataacttctcggattgcaagtaaaggtatgaaaaacatgcaataaaattagtctaagaacgcgcccacaatatgggctattccgatttgtttgagaattttctaattttaaaagattttttttctataaacaacgacatatctagaaagaaatgatttgtgctttgtaatttgtgctttgcaatttgttcagcatgaaaactccccataaccaaaaggtatatccaacttaaacaccaagaatcagaacccgagccacactctaacccagagtcagagtgtaagcggcatcgagactgcaagccagggtattgacatcatcaggttgctggtaggattcaacgcagtcggcatcacccgcagcgcaggtagcggtggtgcaggactcatcactgatggtgactccgaatccagcagtgacgaaagtcgaggtcttgaccaggttgatggaggacaaatcccagaagaggatgtcaccggactgggtgtactcgaactgcaggacgtcgtcgcagacctcggtggtggacatcttgatggagataccgccgccgttggagttggtgagccaggtgtcgctgaaggactcgccgggggcgacggtctgcatctcaccggggtcctcggtgacaacccacaggtagacggtgtcctcgaggttgttgacaatggtgacaccgctgccggtggcggtggcggtggcggtgctggccgaggcggtggagctggcataaatgctggtgctagtgggcacggagacagggacgctggtcacggtagagataacgggagtcaaagtcgagtaggcgacgacggaagtggaggaggcactggcgacctcttcgacagcgacggcagtagccacgctgacggtgctgccggtctggtagacggtttcgtagacggtctgccagacggtctcctcgatgtagttgtcgtcggcgacggcaatggggtgggcggaggcagtcagtgccagaagggccgagagggcggcaatgttgaagcgcatattggctggatgaattcgatattcaaaggaaggtgtttgatagacagtgagatctgggtgaaagagggactttgatctgatctacagactgttaaagagagtgatgtgatgaggctcagccccaagaggtaggaatccaaaggagtgtgattcgaaagatcgtgatggtcaaaggagagaaagaaaaaaagaggagaagacggaggatatagcgccattttattcttaggggtggagtacgtacgagggcattgggcgtgtcagattttcagtgtggcggccgtttgataggccacccccattgaaccgccaaattgggtttggccgtgttgtttccatgtggtcggtgcctgactagacgagaccgtcctgttgatcccattggtagccattgctggggtcaggcacagcgatctggtccgaccaacccgaatgaagacggccagcgaggttccatggatgggccagttcctgagccacgatttcgccggcgctggtcttggggattgtgacttgttccttagcctggactgtggagatacgcgccaggtctagatcgaatcagagtagacagcgcctgcggacggaaagttctcaattgcgcggacctgcccctgaatatctttttttaatgcctacaatctagatcactataagtgactctggcattgtccgggccaagagggacttaatacaagcttatattttagaccgaaacggggtgggaaggagagtagattatcgccggagtcttctttgtcctccgttggtgccagcatggccagactgtggatccaaattgagtcactccatggtttgattaacttttctctcgggtaccctacggggtacatacatgatcaggcacaggcacatacatcgggaatcgcaccctctggacgccacttcggtacatccagacgggttcctggaaaactctgcatcctgccaagccgtgataggtggcaatctatacaccacacacatcttgaatcggtaccggtcaaatgcactagaatcccctatacatccatggacgtggccattgacccgccaagccacaaccccgctcacaaacccactccgaaaaattgctatgttgtacatggcgtaacagtgttcagggtgtggccccgtaggctacatcattggggaagacgtgggtttttcgggcagccgacgtattggaaacacgaccgtcggcgacaaatccgtggttctcaggccccgtactgcctgccaacggacctccccggctgtacgtctcgagcgcattaaacacataaccgaagacttggcggtcaacgtccgaggcccacaaaaagtctagatgctcgtaggtgggaatcgcctgggcgacagtgtcatgtggcagcccctttaacatcacgccgatatcaacgaggctatcgttgtcgccgtacagcagcacaatgggggttttgatgttgcgagtagggtatttgaccggcttgtaaaagcgctcgctggcggcgacgctgaacggggcatagagttcatcgtcgtagaactggaaattcttgttccgaatgatctggaaccaatgcaccacagacttggtgctggtgaaggagtatagatgcaaatacgcagcaagcttttgtgtttggctgatgttgcggcatttccagttgaagagggcttggagcgctgtgtcgataatgcgcacgaagatcggcgggtacagtatcgtctgccacatagttgtcgaggaaagaatgctgcgtcgaccgaacaacaggaacaaaaagtccggagaggctttcataagtgaatcaacaatgcggttgcggaggcccgaaggagccatggccggcgcaagtgccacaaacacatcaatcttctggttgagcaatggatgaatagcgagcgtagcgaatgcctgcgctgtcccctgggagaatccaatataggacaatgacggctgatcggtcacctcgaggatgtactcgatgctgttggggatatcagagaaggcgaactgatcgatagagaaatcccaaaactcattggaactcggcgagcatcggatcgacttcttggagtatttatttccacggttattccccagccatacatcgtatcccctttccaccagctggaagggcaggcaccgttgctcgtctgtcacggctacccacacctcactggacatcatcaggccgtggtggaggtagacgacttttttccgaagcccattgggaccattattgacgcgcattttctcttctccttttcgatatgctaaccgatgaagtccaagaaggtagccatcgcttgtttgtacaatgtgctcctcggcttgaaatccgaagagtgcacatatctcggtgaaatctgacgcgtctgcaatagtggtggcaaatatctcctctttggtgcgcttcagccgggattcacctggtattaaaaggttgaaaagcgccttggattggccatagcagaatgtgatgatagggccagctggttaggggttaatattggtatcatccatattcggtgattttactaacgaaggcaccaagtaatcaagtgaatgattgtctcaagcagaacaagaaccaaagaccccaagagggctatatactcatacctagacgtgaaggtcagttgctgcgttcttcataaaagctagagttccttaccagaacaatctcccgatgaacggaactcgcgacatgatgagcaacaattgttatgcatatgtgcaggtgcacttggatactctatactcaagacaagaaagacagagatgctgcaacgttacgtttaaaagcgcaaacaaacgatgaatgcccccgacgtcattaccaacatgtgatagcgatgcttatctcatccggggattcgatctatcaaccaatcagcgtcgagataactaacggcctaaatttgccgtacggtctcgttcctcgctctcttgctacttgtggttgcgcattcgtccacaaggtcgcgtcaacatgcccagctcatgcaatgatatccgtacgttacatctccatgtcgcacaacgttcaaggaagggtcatgttcctggccccgctggactctctaccgcgaccctccgttgccataatgcaaactgaccacaatcgattatctagggcgggccctggctcaatgcctccaggagtctgactgcatcatggtccagcgtcatactccccgtgaatgtctcagctctcctctcgccgaggagttacccgtgaaatgtcagcagttgcggaaaggattcagcgagtgcaagtgagtcaggaaccgggccgaccattatggacaaaccggacaccctcgctaattattgccctttctcggaacaggcgcggtctgatcgatatgcgcaagcgcttccgcggcaaccagcctatctcggtatccaaggaaatggacggcgggcaatctacctctgggggacagctatatgccggagcgcccgcgtaccaaacggtcaaggaactcagcggagacgaagtgcagatggatccagagaagacaaggggcctgtaaaaagggtatttggattcgctgattacatactggcatggcccggagttcggttacgcttaaaacatacatttcctctctgatactcacattctcattcaagatcgactgagcttcttatacccaatcgattatatatcacaccttcactatctctcgcagaacatccaccagacggtcgggcatactcaggaacggggaatgcgaactcggcaggcggtaggtagtgcccggcgcatccattttcgaggcgaagaactcctggagtgctggcggcaaggcctgatactgctcgcagatgatgtaggagcaggggacatcgtgccacggctcataagtgacttcgcccgagaagaccgcacgtgaggtgtgcgctgtcgtgcgattccattttttgcgctgctcgacggtcaggtcctgccagccaacgttgtcgatgccgtcgacgtgaacgtagtcgtcctttttcttggtcaacttgatcttgacaatattaccgttcatatgatgcatggaccaacctcgactttcatccagggtaaataggctcatcccagcatgtccagcaggctctgtcctttttccagcgcaaaggcagccaggtaaacaaccctcacaatgcctccaggcttgtcactctccgcacgaacatgctccactagaccctcgctagctgtggaggctacaaaaccccgtaggagtgtgccgcaacaacaatgtcctttccctcgtatgctagagtcgttaacactctacgcagcgagacaacgtcgtcttctaatgtcagggaaggcggctcagcgccgatagaggggggcgggaggcattcagaaggataagtagggtgtttagacggtcacgcacggcatcgaagacgatgggactaacccaagcaccgattgagaagacgaaagtcggtctatccatttccatttccagtttatgtacaggagggcaacagcgttcgatgggaaagaagatatgaaaatccaggctattctccagtccttgagccgttatacagaagcgaggagcattactactgcttcgggcaagctagtatcctcatgagacttgtttaggatggactgaatggcccgctgtggatattagggaccaacgacagtcaaaccggcttcaagaggaatatgaaacatgtagttagtcaatctcacccgtttcctgtattctttaggctaattcacgtcctatcagactcctgccctcttttcatgcaagaggccaattgcggtcattagtgtcgttttagcggacatctaccgtttcacggggttgatatagcctggactctacatgtaaagcttgacagctgtaggcttccaactgcagggaggtggaaggaaaaggaaggcaaggagaatatctatcattgagaattggtcatctttggacctaatgtgttcattcgggagatcaggatcatgcaagaaaattgaaatcatggacagtccaataaatataaatctactgagtcttcttgagcttatcggccacaggggcagagtagagccagacaaccacgaaagccaagaatcctccaattaccgaccaaagaccggcaatccatacccagccgccggtaatagcccagctgcgcgggtactcgtcgtgcgcgaagtggcggttggtaacctcaagcttctcctcgatggcggtcaagaagggacgcttgtagttgacgcggaaggagaagattccgtgttgatcgggagtcacgaactgagtgctgaacacagtgctggaatcggtgcgctcgaccggttccaggttcaggcggtggaagggcgagagcatggtgaactcgagctggagcgcgtcgtctccaggtagttcaaagggaacccacttatcgtagacatactcggaaatctcaatgctgtagatctgcaggcaaataaggctcatgttagcttggaagagaatgacaatatattgtttcacgtacagtctcgttcttgatccggtagatcgaggggttcaactctgcgccctcagtgataaggcgatgctcgaccttgtcaaccttcaggacaccagtctccttgaaagcccaagcagtcaactgcttggcgaactcgcggttcacggtaggtgtcttcttgccgctgggcgtcttgacggaggccgagaaccacttgtcctccagcgactccactgatccgagaacagtgaagcgggcagagttacgtgcctgcatagcggaaatgatattcagctgcgacccggtagccaggatatcctccggcgcgggcgtgccctccttggggttgtagctgtaggcagtggcgggggccttgagaatcggagagagcagggcgctgtcaccgagagtctggggagcaactcgagggagagcaagaacaccctcaccatcaaagaaggccttgacgtcagaacggaggggtccagggcgctgcaggacaagaacgtcatgcttctcagcggccgagagggtgtcatagttgaagtggtcgacaacaacttgtgagcgatcgttggataggtgaatatcgagttcgaggagaagggagctgatggcgctggaggtggcagacttgccagaaagggcgaggaggatgtttccatccttgttcataaagtcgacgatgtgtttgggggtcaaggaggggccgaggcctgtattcttaggtcaattgactagacatcgaatcaatagtcgggtttgcgcaccttttgacttgggagggaagattagaaggtggtcgtaagctctttcgccaagcttgaacaaggcaagctgttcactcttggaagattcgattgagacatcgtatcctcgtgctggagtccgagagttagcaaaggatcaataaattgagtcagattaattaccttctaggtctgcccacaacgtggagtacaggtccttttgttctgtatcttccaaaatagccaacaggcgactgccggagctactcagcgcatttaccgcagccaagaagcaacaaataagcaacgcaagacaccacctcattttgaacaaatcccgcgcagcggagcggaaggatcaaaaagaaggaagtgaagaaaggtggttgaagatccaagttgtatacatagaaagggcgacgtgtttaatgggcgagtgccaagacccgagagcgctgggcccgcatctccgaacttcgacttcacctcgtccctccagcttcaattttgcttctctgatcctaaccactcaacaaccactcagtgggaccggtgtatctgttcgttcgtgcgcgcttgagcagtttttttctattctaccggcattgccctcccacccacatcgcaaaaccccgaccggtcgccaacgacctcctcctacagccatgtctgcccctctgttctggtcgacccccctccgctatatccgctgggctgcgcacgagaagccagctatcctcgccgctctgtgcattggcgtcatgggccccatctcgctggctactattcctcccatccgccacgccctcggtgacgtcgaccccgagcctattcctctgacatatcccagtatgaacccattcacttccaccaaatcggtgcataagtacaaaacccatattgagtaatttgaatctgaccattatcttcactacgtacagttccgcagggtccgcgggtgatccccaagggctacgatgacgaataaacgggttcggaactacgaaaatgtcaagttagagagaatttcgtgtattgtccgagctttggaggaataaattcagcggatggcgggagatgagttggctgtgccactggactgatgaacaagtcccatcgcatcagtgtgggcaatcgaatcgacttgttccgggcaacttctcctggccatcaacatgctttgataccaatatttgttgcgcatacgccgaaggtcgagctcggcgctacagtgtatgtactatgttttgtgcaataatcgacatcaagtcgctttctaggtttcaagtatggggtatcttaggaataattgcattcttgcgcacgaacagccgatatggtttccccaccaaggagagaggctgctcgccagaattagtatctgtaatacccgatcaattgcagaatttgcatcatactccgaagctgcagcatcaggtcggacaaaaaagccagcaatccaaggctgtacacaaggaagtaaccatcacaaattaatccctttcccgccttttccgccgtgtacccaaggagaagatacataaaaaatacacctaataatataaaaagactactgaaaagactaccaaaatgacaagaccgcataagcggcctactattcttgtttagatgacatcttgattactccgaggtaacagtatgcagagaaagagattcattaagatcatggagtcaatccaagaactcgcacatcaaaacgtcaatcacagaaggaccaacgccgcaaatgctcatatctacatgtaggtcaccggccttagtttatccaagcacatcgctttcgcaaaccaaggggaaaaaaaaaaaaatagaacgatgactccccttctttcaagggaaagacaaacaaaaagaaaagttgctaagaacacacaaatccctatacaccgttaaaccaacgaaaagtatcacattattgtggggtgggtattcccggaatccgtgagagcagagaaacaaacaaaacgctcaagtccgggccaccttttcgtaaacgcaatcaagacacatcactcttactcctggctggccagttgcagaaaagcatgagagaaatcaagaaggtccacgggaagtccaagctcctgccacggagcaatgggttcaattccagtgaagtccatggtataaaaaataaagtgagattcatatccaacgggaggtggaaagttcccctgactggagacaaattgggaatatgagaatggtggccaagagagagaagaaaggcgtgaagattgtccaggagattttcacagacatcaacattattcctaggggtattttggagatatcccggaagaaagcatcaagtagaccacagtgtgggtggagagaagggagaaatcatgcaggaaaacccttggggtggtcattcttgtttaccgccgacggtgggggttgtctctggttgcttgtggcctgcgctcatattccggagtgtatctgggctccattcctatccggggatccggggcagttgtggtaggataggacatcccagacgttacagtagagtactcctgttcggcatcatatccaggtcccgagtatcgtggagcattgcttcggccattgtcgtaaccatagcccgtgggggcatatgtatacgattgagggtgcatgtccgcagacgtcacaatgggctggttggaaccagagtaggaaacctggggcggggggtacggagctgtacctgatgcatatggcgagtgagtggcggatgtgtaggatggagggttggagtaaggggtattctgggatccactgtaggactgggagtagggatccatgtattgctgaacgggtgctgcggtaaagggcgtgggggacgggccctgtgactggcgagtctcatgaacaggcgcaggagcatagttcactggagcggtgttaggtgcatgggaaacgttcgtgtcttgaatgtaattcccacgcgggtagcctaggtcagcccgacgtgagacgtccgcctcccagcgagcggagtcagccttcagatcagtaatcatctcctgtattcgatgtgtggttagaatgccatcttcacttctcccgcttgctgtcgcttgtccatagtcacttacagaggtgagattccgataggcgcggataaagaatcctgggcggccctgttcatggtcagtcaaaacggccattggggtcatcgggggcacgagcggaggacgcacattgtggttgccaggtctcacgagggcatcgtttccaaggtagcggcaaatatctgcttgaataacttctcggctgattccttcaccggggatgaaatattcattctgacgctccgggcgtccttcatagcggcctgtcataatgtattccgagggaggaatatccggtttaaaaatttaaagtcctcggatccaaagggccagagaagagggagtccggagtctggaagatggtttgagagtcccgggaaagttgatggatggtggtgagtccgtttttattgtaggatgtacaaattctatcgagcaggttccagagccgacaatcaacgacttgaatggtttcttttctcgcttccagggcaagcagaaaacgagatatgatccttgggaagtggccagaaaaaaattgatcctggtcgcgaataacagtccgtgggaaagtccggttaatcctgggaagaaatcctggttgtccactggtagcaattatcctgggaaattgagaaggcctcaaaaaagacggtgatagcgacacgaggttgggaagggagaggatgggttgtcagggtcaattaggagaaagagaaacacggctgacggggtcctgggatatctgtaatctgttcggggcgaactagatattgggagaaagaatagttgtggcaagagaagccaggggaatatggggagaagggagagaaagacgagggagagggagagaaggggaagaaagaagagggggggaaggtaaagtggacatcaaagggccagggcggttgggccgtcttgggctggtgccacgactccccactgagatcaaggcaaaaagcatgcaaggtcaaatgtggattagactaatgtgcaaccctatgtctatagccgcttgagtattttaattggtatcatttatatcatttggggccagggagataggactttgtacccggtttcatataaacatgtatctataactatatacttccctgatcaacacccccgaaagtgtgaatgtacacagctatacggagtggatccctagagacgtcccttgtaccctaaaactagaccttaaaagggctgctcttgggtttcactcaattttagttgggacgaaaaaataagggccgatcccccatattcaaccagcttggattgctccctagtctgtgcccctggaccggatgaatatcgaaactctacaggactccaccggtggatctttagccttcagcagcggtcaagcaggactgctcagaagaaatgagatcataaaagctgtcagatgttcatatgtacggtggtaagatggcagtgttgaggcggcaaatcatcagactcaattgtgattgatccctcgcacaccatctgcaaagggagcatgacagccaactgttgacaaaaagacggtggcgacctgcgaacttgccaccgaaaactggtggccgatgtccacacgagattgccgttgggcaggaatgcgtggctttgggcagctgcgcgaaggctccgagcttctggtccactcacaacccgccaatgtcagctggatcgcacagatcggagatcccctgtctcgtttgtttttttcttcaggttcgagactgtcgtggacgagttacaacatcggaaaaatctgcacgagaacacaacatctgactgtgcaggagtgggtgatgaaaaataagcaggcaccaagtgatgggtcatttggacgtcccagaatacggagtacctgtggatattgaaggaattgcggctgtcttggacatgtttatgttgttgaagaagattaaaataagtcttggtatgtaagatgtaccccgttgttctacggagtaataaattggactgaagattgcagttgcccctgagttcaggagacctgtgattagtaatcgtacacaaccatcgctctgccgccctcgaccgcctgttggtgctcagctttcagttacattcaggtacggacaagacttcctcaagaaccgaaagactcgggtctcctgcctccacgggcactccttttctgagaccgtacgcctggaagatgccaacgacccttccaaccgtgactgcccgcttttgagactccgtgacaatgcctgcggtagcatagagggtctcccagagaaccctccgtaattcgaggtgacgggcatgaaagtgccagccatctgcaccaaaggttcctagcaaggtctcaaggccccaaaatgacaatccaaaaggaccaacagtagcatcacgccagtcgactatactggcaatacctcctgtactcgggttgacatggatattcatttcccataggtcggcatggtttagcacctgcggatagtctagggcgaaaagcagtggtagttgatcgcggacctcggacctcggtcagcttagcacgaaagcgctcaggaagagcatcagcaagagtgtccagcctttgctcacggacttcagtcagctcggcacgaagcgctcaagagcatcagagagtctctaacctctgggaaatctctacagaagtaacggctgtgtctatccatggcgtcatatcgattccactagtccagctcgacgcgaaaaatctagaaagttaggtgtttatcgcaggcagtgtgttcaagaacactttgcaagatcatatacagtcctctcaagaaggctgtatttattcacagcgcaaatctcgcgttgggctatagagaaagcgaccccttctacaacatccatttcatacacgataagagggcctaacgagtcgcgtctcccacagccaggggcgaaatctttatacatgcttttcactagtgacatgaccttcatatcaagagcggcttcaggggcgcagaattgaatagctttaggattgacactggcaataaccgtatagctcgtcatgccgtgtgccggcgtgggagcaactgatccacctctggtaataagggcagcagtgttctcttgtgtgatagacttgtttttatcaaaaaatctggcaatttgatgattagataaagcctgaatgccagctgcaatccaccatgtatctagtgatatccatcgctaggctggctggtttcttggttggtcaagtcgtggatgtagtatgcgcgagcagctaaaagaggactatgggcagtatacaaagcacacggtggtaggacagacttatacggtatgttggaagtgttccagggtaggaaaaggttaaatggtgcgcttaaacacagaggagaggggtcttatataacgaaagtttccaagtaattaatatcattcacaagcggccacctgaataactaacacaaaacaatgtatgactcaacttacaaccctccagggctgctgtatgttgtagtctatagaagagggagaacctcagggcacgtgcccacactagtccattttgggttcttgtcccaaggtgagagcatcggattccagctctgaccgacaaccccatggactaatatttaccgtcatgacgcacgtgcgagcatgtccgaacccaccgagtcgtccgatcccttgaagctctcccggttcacctatcgacaattgcaattgttacgacagggatccacggcaacccctctgcgcgtgattgcgcatatcgatctcgatgccttctatgcacaatgtgagatggtccgcctggggactccgcgggagaccccattagcagtgcggcaatgggactccttgattgccatcaattacgccgcgcgaccgtttggaatcagtcgattaatcaatgttgcggaggccaggaaactttgtccagacctcgtcttacagcatgtcgcgacttttcgagagggggaggggggacggtgggcatatcgggatgattcgttcaaaaatattagcacggacaaggtgtcgctggatccgtaccgagcacaatcgcgaaagatcctccagacgatgaaggaggctctggctacatggagtgtcgatgatatggaaaccgaaactcagaatccgatctcggctgggttggagaaagctagtatcgatgaagtattcattgatttgtctccattgatatatagggcacttcttcggagatatccagaacttcggatgggaatacaagacgagaaccgggatgcacaacttcctataccgccgatcacagctttgcagtgggacaccgactgcttagtggacctcgatcaacatgaaacagaggaggatgatccagactgggatgacgttgtcatgctgataggatccgagattgtgcgatgggtgcggaacgctgtctgggagaagctcagttacacttgttcggccgggcttggccgcaataaaatgatcgcaaaactaggaagtgcgtgcaacaagcccaacctacaaaccgttgtgcggaatcgggcggtgcagaatttcctaaatggttataaatttacccagatcagaatgctgggtggtaaactcggcgatcaaataactgccgcatttgggacggagaaagtcagcgagctccttaatgtaccgcttgagcagttgcgcactaagctggctgatcaaacagcatcctggctttacgggatcatccgcggtgatgatcgcagcgaggtcaatccccgaacccaaattaaatctatgctatccgcgaaatctttccgaccgagcatcaactcacttgatcaagctgagaagtggcttcgtatcttcgcagccgatatatatggcaggcttgtggaagacggcgtgcttgaaaatagacgtcgtccgaaagtgatcacgatacaccatcgaactgcgcaatctcgttctcgccaaatcccaatcccaggctctaatacaattaatgagaatcttctctacgatctggcgaatactttgctccgtcaagttgtggctgacggacaggcatggccctgttccaacctgtcgttgagcgtctcaggctttgaagacggcgtggccaacaacaaggctatcgaaggcttcttgattcgtggtgatcaagcgaaagctctaagtcattcttcaagaccccgagataccgataattcccccagcgaacaagccccaacggagaaaagacgaaagcttgaaggtgacggggataagatcaaaagtttcttcgggatcccatcacatcttgaaactcctgccacagacgagccagctagcccccaagaacccgctgaaaaagactccgaacccagcgggattccccggttcgtatgtccacggtgctccaagtcgatgttcgagcatgaaaaagaagaacatgacgattggcactttgccaaggaccttgcaagccaggacagagaggaggccagggtttcacagccgccaccgcctacgaaaagtagtgcacgcggtacaagttctcgtggaagaggtggccggggtggagggagtcgggggaagcccgaaaaggggcagatgcgacttgctttccaatgacctatgagcctatgttgtatgtcttgtttttttaccatgtttttcataatctgcttttacttggcatagctacgatatacccaatgccacaaatttatgccatcgcctgattgggcggactaatccaaagttataccttgaaacgtcgattcacaattaagccctttcccgccttttccgccgtgtacctaaggagaatatatccataaaaaatacacgatttaattaaaaagagatcatgacgttctcaccgactattcttctatctcagaatttcgcaatgtcaacataagacgtcctgagatatcttggaatatccctgggctgtagcctgtgagtgcctggaagtggatcggatgttaaagtcggtgtataccaggtggaggggtggccttgagcagaagcacccaacaacccacgtcaggcaagctttgggcctctaaggacttcgatgacgctaagcatatgagactccaccgagtacatttctgaagcccaaaatggcagtttgagagaagagaaccaaggttctggcaggattagctaatattctggggtagggccggagactggaagacctggggaataaacaatggaaacggggaatctttggaagatctggatgggaatgatgtttagctacatatctcgcaaccgccctagtgacatcagccgcggggccgatgaccactttgcttttttccagggttgtcagccttcctcaaaacagttcacgtttcatgtatgtgtacggaatacgatcagttggttctcgtctacctatattgcttgtcgtactagtatcattagccgcttaactgggtgatcttgactagagcacagcccaccttcctttgcaagccccaccagtcaccaactggatttatctcttgccttcaactgaaccctttgacaggctcctgcgagcttgaactaagagtcttctccatcgtggtcgagtttccgaccgtagctacaccaaatccaatgcggtgatcactcgcacagtcccacaatgccccgccgaacaccaccccgcgactacgacgaagaagatgacttctatgaagttgaacgagagcgagaccgccggccgcgccgacgagatcgcgactatgaagatgtggaatttcgtcgtcgaaggtccgagccgctagctgaggatatggagcgtatgcacatccgagaacgtcccaggcgagacttcatggacgaaagctttgcaccgccgcgagcacgggatgatgtggttcgcacgcggacaaaggaggaggtcgatattgtctcatctgaccgcgacgatgtctccacgcggccatctgggccccgtcgtagacctcatttccgtgatgaagacgacgaggatcttgtttttgaggaacgagagacacgccggggcagtcgacgtcatccacgcgaagttgacaaggattttatttttgaggagagagaaaggcggccagagaggaggcatcgtcccgggcgagagcgagaagttgaagatgatcttgtcattgaggagagagaaagggaaagaggtggtggtaggaggcgtcgttcagagccgatattcgaagaggatgaggaaatcatctccgaacggccaagacgccgagggagcaggcaccgttcccgggaatctgaagaggatgatctgatcattgaagacagagaaatacgcagggggagtcggcgtcatccagaacgaatgtccgaggacgatcttctcgttgaggagaaagaagtgcgccaccacaggcgacgtccagaaagcggattcgaagaggatctgtcagttgaggagcgggggaaacatagaggaagaagacgtcgccccgagcgcgaatttgaggaagaggaagtgttcatccgacggaaagaaagggaagagcccccgttagatcgcggatgggaaagtgaaatcgacgtgcgatcgcgcgaaaggatactggagtttgaggaagaagacccataccgccgacgacggccacggccacggcctccgcctccccaaacggtccaggtggaagaggtcatccttgacgatgcacccccaaagcgacgccgaggaccagtcgatttttcagatcgagaaattgaagaggatgtggtcatccggcggaaggacaaggggccacgaccagacgacagtgatgacgaggagaaaatcgtcatacgcgatcgacgtgaaacaagacgcagtgtaccttcggatcccgagcccgaattaagaggattgagaggtcttcggcgaaacggtaggcgacggattccactggatggagaggttgaggaagagatcagtattcggaaatcggacatcccatcacgccagtcgccgcttcaagtccacacacctcgtatgaaactacgatctcggagaggcgggcgaatgtcagaggaagaaataatcctcacacgcagtgacagtgaagactctctcgctccggaagactcaatatctccaactagcgggccatctcttggtttcaacgatccgtgggagcgggaaacaatttcacttcatcgtcgacctgtgccgctagaagacgatagcgatatagctcacagccacgaaataagggctccttccatgcgtgagatggaaaaagacatagtgattgagagcacgcgcgtagtagacgaaggccctacaaacacggatggctggtctgtggtgcatgcttcatctcaagacgaagccattatgagcggagctctggacgttgttgaagtcaaaccccgacatgtgccactggaagaagtggaaacgggccggattgcgcagcaggtcacgggcgcggatgaatcgccaaacgatcggtggaccgaaatagcgaagagattggtagtgagggaagctattgagcagctcggattcgagtatgaagagaccagaacgtgctactacatcttctcgtacctcaagccggtatgtatcatccgaacagacgactttcttggattctgacttttggccacaggaggacatagatgagcttgttgaattgaccgacgagattcgaagtgctcgtcgtagacggatccatgacatccagcgggagcgctctgtgcctgatatcaggcctcgccttagacctcgtgtggggatgcctccgagggcatggttgattgagaagcgcatgcgagatattcgagatcgagaatggatgaattcccggtaattgatctaggaatatgatgtttacggcctatgatttatgatgaatttgtgcattaaaattggaaggtgccattgacgtcctgtatgtatcgcgagatatcctcaattcaagaacgatgtcgtccacatgtcccttttagtatgaatagaacgcgcgggctatgtataaaagatataataatcgctcgagatcaagaaacgtcttcttctctcgttcacacccagaggtataccctatatgtaagaccaatatcgccgacatgtatgatgttccttcctgagcataaacagaatgagcaggccacacctgaagaatattaatcgtttgcgatcaaaacaaagcttcccccctccttcacactccctccttcacataccctctctctttcacgcgttccctcttcacacgcagtgagatatcctaacttcaagaacggtgtcgtccatatgttacttctgaatgtgaataaaacgcgtgggatatacctgaaggatatcaatcgcttgagttcaacacaaagctttctatctcgtttagaaaccgagcacacgcgtgcaaatcggattcccacctcaccgtctttgatgcaggattgcctccacgtgggtcaacatgtcaaacgcgtccaccactgaattagatcgttcagttactgttgtccgcgttaatgatgagcgtttcaatatccagtctccccagcgaaagatcctccttcgccaactcaacagagctcttttcgaacaacaagtcccctcgccattctgggccgttctccaggtgtgcgatatcgagaagcttgagtacatcgtacagctcgccaacttgtcaatgaaactcatgcataccatctctgatctcatttgtgctctcccattcaaatggacggcaactccatctgtcgcccaacagctcgaatcagcatactcaaccccgacttcgggttcgagtttcagttcacggccacgtgcttccccggttgcaatctatgccgcccgagagcgagatggatacaagtgtgtcatcacaggaacccgcaagctctaccaaaccaccccgatcttcccagctagtgcagccagctcccgcttgcaggatgacccggattctcctagcctttggaagtttgcagatgtgttctggggaaagagtacaactgaaaggtggaaacgagccgtcttcagtgacccaactcagcccgacaatcctgtcaatgattgctccaatctgatctgccttcgcagagaccttcggtctgcatggtcgagtgggttgttcgctctgcgtcccgtctgggtctcggaggatatgactgaaatggaaatcgagttctattggcaaccaaagccagaccacaagctttacgacgtggtggatgtgtccaaggagcctatatctagcaagaacgtcaacagcgtggatcgactgatcgtggcggtaggaaagcgaggtgaaccaacatatcgtgccattgagtccggctaccgatttagaatgacaacggacgaccccgtccttcgcccgcttccgagtttcgacttgttggatatgcagtggcatttcacccgactgacctccttatccgccgtggctagtttcttcgatgctgatgatgatgaagacagcgtcagatcagaggacagcgttagatcagacacgacgactacacagccggagcaccgcggccgaccggagtatcaccctctgcatgccaaccctcccagcgcccacatactggcctgggttaaatcttcactttcatctggttccccgcccgagtcagagcaacgcaaccgactggagggtgatcctctgcgttcgtctccaagctcccacattctggcttgggtcaaatcttctctttcacctcccgagccagagtttgtcgaggatatcgatgaattcatgatggatgaagcgatgattggccctctgccagggtccgacactaacggcttgcgcagtgttagccagacctcgaaggattccgggtcggcggagtcagcgggttcggcggattcaggagattcggaagccagtgtgatgattgatgtgatttccggaactggccatctatctcttgacttcagccgcgacagttaagatgggagcgggcccaacataattcatgtacaacagcagactagttgaattcatattcttattcaatgcggatgtatcttgagactgtagtatgaatgtgttgattgaatctggggtcctataactcagttgacttgacggacatacaatgttgtactcattgtatattgtatggtcggaaacctgcagcaggaagtgatcaccgctgtcctccgtaggcttgtttcagatgctggacgccacctgcaagccaccaggcacaatagcaataattattgacttagccctgagcctcgccacatgttgaagtcgagaccttgcccaaagaccacctgggaaggccaggcctacggagcagagagagactggtcgagtaaccctaactacgcggcacccgaaagccgggagattacgtcggactgggttagctcccccttcccgcgcattgtggcggattgtctcagccatattatgccacaacatcatcacttcaggatttgccttggcagggaatattcgtaagtacggagatgcgtattaatattcgtccaatgatgctcggtattattcgcgactattgattctgtatgggtcgttcggggaacacacgacgtgtcctactgtttcaactgaaccactgcagttgtatttgtgtaactgaagattgaactattacatccttcggtttgttatagtatttagttatgcacctgctggaatttagatcgatcggaaagttgtagctagcacatggtatcatttttttatctttacgccgagtggagactctccacttgggagatgagtgggatgattcatattggacgagtcgataaaggagagataacctttgaaaaaggggaaaatcatggatgacacgtagaccgtcgtccgtagagtgtacggtgtacaatgctgtcctactgtgttaggatgttatacaaatccaaatatccttggtgctccgttctagaccggaggatgaatgcacaagccagtctaatcacgttctagaaagaaaacccgcccggaaaacgcacttaatagccggtaaatccacgtatatcctagcgctgtttcatccaagccgagttcgcttggatccggcaaatcacagcgatctctctagtcgatcgtcgtttgtggcggctgggcatggaaggcgagagcgaacattcggatcatatacgattcctgataactagaatagaatatagaatcctgtgctccgtattacctcgggcctagacaccccgtaccaaggatttgcaagttgacaggtggctactccgtatttgatcgtgatatactccgtcggaggacgggagtaccttggaaggccctcggtactgaagactcggtccgggtcccactagactaggaactccgtacaagttaagttacaatgtggctaagctgaagagatggagtggaggaaatgcagtgctattgccacaagcttggattaatatcggcggttccctagctttatttataaataatacacccaggccagaaatccagagttggaacattcttgttcggcgaagttttcctctccacttctattacgtatgtccactctaacgctgcaaaccgggtcatgatgcactgacgatctcttggacaagtgtttcggatatgagatatgaagaagggcagacgggacataaatagaagcacactgcctgtgcgtaggagggtagacggagtgatatagatagaaaaaggaaaaaagaaaggtatgcagggtggaatgtttccttggtatagcgatcggtggtctaccagtcaggccatggcagtggagaagaatcggattaggaaaaaaggcaataaaatacttgattgtatgttgttgtggtatactgtggttacttgtacggagtgtgatatacgtagattatcgaacggggttttacaggctatgtttataggcggtttatcggctgtttatataggcgtaggcacaacataactagttaacacaacccgatcgctaaagatgatccagatgatctgtcaacacaaatgacatcgatctcatttaataattcaaatcccagaaaatagaaatcaggatccaccggatacgtcgggactcgacatactccgatgaggataaatgtaggatagcaggatagtacctggagagcccgtgactgtggagatcccccttctcctcttctctctttctctctctcccctgtcgacttcgtcttttcctccattcattttgtttctttcttttcttgtgattttgttatgcagtcgaaatgtgttgacaccctacaacttttgcagcgttaaagtgggggacaaataagacgacatttcatattagattcttcaaccctctaggtgatcgacaattcacttcggtcggcccacacacactcaacttcgatcttccctcgacgcctgggacctcactgtcgcttaccctctcacccctcgggcgcgggacaataaacagatatcaacggaccttccggtttgatgggaaattctcgatcgagcacacccaccatgaaggtcgcggtagtggtctcggtttttgctcttctggctcggccattcgtatcggcctcatccgacctggcctactgtgctacagagaacacggggtcttctttcacgggaggttagtgatcgcaaccgttctatatagatttagccacatcgctgactcggcacacagtttctaacacatttcaatcgaatggattatgtgaaactacctgcaccgattacgcttttgctatcctccaagggagtaaatgctggtgctcgaacgtggctcccgccaagtcctcactagccgacgacacttcggactgtgatggtgcatgcccgggttatcccgcagacagttgtggaagcacatccaaaggagtgtacgcctacgtggaagtggtcggcaacgatgcgactagcacagccgctggtacaacaacttcgaaaaccacctcgtcaacctcaacctcgaccaaatcaacatcaacctctacctcaacgacctcggtaagccaatcctctttgttttgacactgttttctcttttgggcatatcttgggcacactgggcatatcttgtttcctgtttttgtaccgataaacctcctgccagcctagctagcctgattgggtgtttgactctctcttcgcttgtgggtctaatatcggggatagagtactagcgacccgcctgtaacggtcactgtgactgcctccgattccactaccacttccactaccacttcgacctcacccattgtatctacagcacaaccggtttgaccagtggcacgtttagctaactttttctcctagtcaacttcctcggatgataaaacaacaacttccttgccgacggtctcagtgcagaccaactctggcggccaagtcaagaccatcaccgtttctggtgcaagtgcaacttctggcgctgattccgcatcgcctagcaccaccactagcagcaagtcgaaattgagtggaggttccatcgcaggcgttgtgattggcgtcctcggaggactcgctctggttggtgctctcatcttcttgattttcttctaccgcaaacgcgctcgttccgtcagccctatcccaagccaagacatggcagacgacagaagcaggggatcgagtttcatgggaggtttcttcccgcgaagcgataacggatctctgccctcacgtacgggcacaacatttaccgatcggcgaatgaagaccaacacggtcctctacccgaacggtcatcgggacagcagtgtttcactgcaagacaacgaagactactcgcgtcctgttcttcgggtaagttgaacataacacttagtcccggcggaacattcttgctaatatcattctagcttaccaaccccgactaaatttggaatgaccattttcctcgaccactttctttcgcttccatcgtccgcgcctctcactctccattaatctccagccactccaaaacagcctcattatgatacccacttgtcgctcaatttctttctctatcttcccttctattcttatgggtgcagctgtggagaatacacggaacagcaacatgtgactccgggcggcctctactccgccaaggaacagttatgagggtgcattgacattcctccaaacacactagaaggacacggaaaaataagagcccaagtcctgaattcaaatctatggttaatcccccggccactcgagacgcccttcacgagccatcacatacattatcctgcatacatacccgccacatcggcgacgatgccagcccatgccgacatgttctgaaagtatacatacatcaccgtctttcggttgcgtctgacatcgccagcctctgggctcgtcgctctcttggcttcttatcttttctcttatttgttcccaatatgcttattagctttgcttgttttctcttcatttgtcatgtaacacccagcctcttttgtcgctgcccccgtcttaattgttcgtgcatttgctatggcttcgatctgaggggatacgtccccggcgctgtgcttagactgaccgattcaatgaaactactatatgcttgggataggatttggtgattacgttctgggattgtatgtttattgcggagcggagcgaagcaattatagaatacttgtatcaaagttatacataaagccgtacctaaacttgagaagggtaagaaatatgtatagaaagacaaacaataaggctgcataagcggacgaccaaagtttcttgtgcctatatacttcaaacgtgaaggtaaatgactaccggttggcatacttcgtcgccgtaaaggcataaatgccagatcattcattccagggggcaattgtgatgcaaatatacgatctaagggacagaagaggtaatcaagcaatgtgcaatgtgtaaaatatatggatgatgacctaaatagctactgccatgaaactctctgagtagcttcacgcagacaaagtcacaaaagacctcctcctctggaaaccaggagaatcatcttctgcaagatgaatccaatcctgccctgccaagggaagcttcagtctttctcacagagcaacttcacgacctccaagcttccatccgaacggcgcacataagcgtctcagtatattgcgcacactacggcgaatgagcatacggacaatgtcaacttcccaagctgagattgccaccagaatctcacggcctcctatatacttccctggggcaagttcggcgttactgttccgcatcaagcgcgcaagttcaaaatgacgattttgaaaaccagtgagcagagtagcatctatcgatttatctagggacttgggatcggcatctgcctcgataaattccctggcaatatccggagctgtctgcttccgtgcagcatgcagcggagtctcaccccttatcgagatctttgttatagtctcatttgtaaggtgaggagccaccttcgggaagaactgacaatcattgcgcccggccagagcatgtgccaccgtatccctgttcgaggccgcttgattcaaatccaagcctgcgttcatacaaacctgcatgacttgccagctagcccaacgagctgtatataataagcgaagccagcaaccttggcgccgccggaaaaggcacgaagcagcgccaaatcggtccagcacataaagtcgtcatagggtgcgttgcggtacttgaagtgcacataggaagggtcagcaccgtattccaggagtaaagttaccatcctaggttggttggcagcaaccgccacatgcagcatgaatccaccagtaaggctgtaaatgttagggtcgacgcccgaacgcatgtatttcgtcacgatgtcaatatccccgcgcttaatggcacgcgcgaagatctcgcttcagtgcggcccctttgagaatcggaagtcgtaaccccagagtgaccatattggcatgtcgattccggcaattgcatttggagaattccattcccagtcttgtccctcgtattcttgcctaaggggtaggacttgcgcagtcagtcgtcttttctccgtgacactatccgcgaggagcgagtgtaaatgcttgcaggtttggtgaagcatacagcggtcccggataagcgccgcatttgcaatcgccagaactaactcctcgggcaaattgcctagcctgaaggtgcctaggggcaggctggggcttgtaggtttagacatggtgcaatttggcggtggacttggtgacaagggttcttgtcgaattttgaatgtagacgtcaagccttctgcgaggatgttgatgtaacttttatgcaagaaaaacggttaatcatgagagctgtataaataattccaaagtgttggctccatgctgagcaggcttaatggactttaagagatgccacagagacctaacacaatctgtatttcattagctagggtttctctttgttctttctgtcgtgatatcaatgatatcaatgaatagatgcatcttttggctctgtcatctatagcttgtttcacaaaggagaaaaatgagagagaaagggaaccatgagttttcttgtgttcgctggcaaggaagatcaaacaaggtatgggcaacctgaggcatggatggtctcaacaaaaggccagacatccaaaacaacaataggtcctactgaggacaattccgacggaaacaaaggaccgagcgtgtcgtccttcaactagatacttgccacttgtagatactttggatcaataacatccgcatatcatgccgtattctaacccctgaaacgaaacttgatcgtataaccgataaaatatatgcttttctccgtggtggcagttgtcaccgtggcacgaatagatgcatcatatgccgagtgttccgcgaagcgctagtaccaaagtactgctcgtaaaatattcaaaacacagtcaagctcaatcaaatgaatcaggattgccttgcacaggtatctatctagactgctgctgccttgttgatgcgcaccttccctaacttgactctgcgagccaaatacaagaaatatatagttctcggaacaataccggcaatattggtgaagcgctttctattattattgaggcgcaaatatgactgataattaagcttttcacataaatggacggagatttaatctcaatgcagctatatgcacctatttagatagaataatatctgccgccgcttttatagccctggctcagtgagtgcgccgggaccatttaggcatagatctcagcgcgaacctcaatggaactgcacctacccgcagttccagctccgagatgcagttcagattcaaatcttagatcctgaggttcttcaaaatagaacaaacaaaagaaatctgcttatccttgtgatttacatgaatcatgtagaccctggcagtgcttcgtatttctttttatttcagaaggatcggcagtaaggcaactagagtagcttggaggaaatgcgtggagaaggcaaaagaaaaagacccatggattgagcttggctgctagctaagcgagagaaaggaagaccaatccagggagggagcaaaagtcctagttatccacccccaggcaaaaagctgactcaacaacctgctcatagcataaaggcctagaactgagacctaagctaaccttgaaatgagatcggtgatgcatttggtcccaaaggcggcttgccgtgaggagtaaataatataacctagcgagtcataaatatcttcacccactagacaacgcatggcgcttgataatcatgatttattaccgcaataggatgcatgtgacattggaaggattttattgtgggataggacgtatatagagtttaagaagagtgaggaaagtacgacactgattgagcgcctacaccgagtactttctgtgaaaataaaggggcgcacgcctcgtacaaatcatctcagtggatatataagggcaagaggcgtgggagagaattaatcgtaatttccacaaatgggaggaagcaagtaacaagataagtgatgacttttgcccacgttccatgtgtttctgcttagacgttgccaataatagataaataatagcgtgaaagacaaggatcccaattccggctttctggctactcaacccctaaacagaaattggcagtactagaggcagacttggcgagtggagatatccattgtcgttgtgaaagccgagatttagggttaaaagtacggtaccatggaaggaagcgggacatcccgcgcgtgtcaaacggacggattgtggggccccggcatgtccccggcactgggatcgaatggcattcggaggaccgttacgaagttatgaagtgtcacaaccacactagcgagtcattgcccagcccaggccctagaatgtactttttgacttgaatagcaacggctccccctatacggagcacaccgacactgagctttctttgggactgaatttagtttcatgtccgcggatcatcaccagtccgagcaccttggatagatcaaaaacaaaatctgtcatacaaaggagtcttcgtcattaaatagctgaaatatacatatggagtggtccacccggattgccaggatatacatcttcaggtcgcagggctgtgtcattctttcgtgatttccccccacacgcaagaccgcaaaaatgcctagcatcactgctacaggtgactttggcccagcaccggccggggtagatctggcgaaaaatcagacaggcaacttgttgggagcggttattcctgtagcggtgttcgggaccatcgcagttatattgcgattagttgcgccaatgaagaacaaagaggccagaaaattagctctcgatgactacctaatcgttgcagctcttatattctcttggggcacagcgatatcctgctttataagtgagtcaagatgagttaaatggatggcacatcacttacaccagattccctaggcattccatatggtaacggttaccatttacaatccttgaacaaagcggagtttattactgtttggaaggtaaggaaaataccgaacgaggtgcttgggatagactctaaccaaacattcagatactttttgcctatgtgatgatttacgccacagctatcaccttcaccaaatcctcgatcgtcttcttctacggccgcatcttcaactttcgctggtcactaggcttctgcatgttcttggtgcttggatattgggtcaccattatcgtcacagttgcagtggcatgtcgaccactgccatatttctggctggcctatactgatccaacagccgttggtgtatgcattgatgtgcccaaattcttcttcggcaatggaattgctgctatgttgattgatgtgattatactgtgtatgccaatgccaacaatttacaagttgcagatgcaatcgtcgcagaagctagcagtcgtgggaatcttgctcctagggagtttgtacgttcttctcctctcctactatatcattgatccgggctaatcaacctcagtgtttgcgtcgcaagtatttgccggatcatctcgcttcagaacaacacccacggaacagacgctacgtggactatggcaccggtctttatctggtcgtccgtggagcctttcgttggtatcatctgcgcgtgcctccctacctttgggccattctttcgtcggtggtggtccaaggctcggacagggcgctcatcaaacagccgcaacaccccaagtggcgagaatgcatctgcatctccttccacgacctggctccggaaaccccgagccaaaaagccacccatggactcactattcagcatcaatgaatttagctgtgtagatgaagttgaattaatgaacgatatcagtggcccccgatcgctgagggacgaggctgtgagtgatcatcatgatgtggagcgaggagacccttgtgctatcacagtccatcaggaggtggatgtgacatgggataagtataaaacacgcaaataatgctgatctgccttcaatggggagtccctgggctttgtgtattgcagtttgagacgcatcacattcgagaaatgtacgatatgaaataaaacgtgccattggcacatataccgtcctggcaagcggaattgagataataaaagaaaccttaacttctcgcacaaaacaaatgggaagcataactatgcagaaatacacgtgcactaatactccgagcgttgtaacaggtacgttgggggtcggttcattgttctccaaggacccttcaacgcaggaccgtttttagcgtgaacccaaatttgcgcttcatttcgaaacttggcgtgataggcggcgccatgtgccaattgaaaggggtaagaattatggaaattatggagagagttactactccgtactttgtactccgcacgtccgactagtttccccgtgctggtgtggagataagctgtctagtgggtttgccaatagccaacgacttcttctcaattgacgctatataccttcagaaacctactccgtgtacaaaagtacagagtaacagcctagaccaaatgtgttccccaaagccaaaactgagggggaaaaaagaaatcaccccatatgccccctaacttctcatttcctctaatctataaagcgggagctatcgtagcattgtaatagaaattcacaaacagtttagtcttcaaacccctcaatatgcctgaccttactgcaaatgggttaacacctgctacccgcgtggctaacggcgagacccctcccaattgggtcccttgcgccgagcaacctgcctttgcgcgacggaaactaaagataatctgtatcggcgcgggttactcgggtttgacacttgcccacaagatcgatcatgagctgaagctcggcgatgtcgtggatttcaagatctacgagaagaatccccaggtcggcggaacctggttcgagaatacctatcctggtgttgcttggtgagtagtctatacttccaataaacatactttattttctaacatatctagtgatgtcccggctcgtaagactcctcggtggctctttggaaaccaaaattgacattcatttagatgcatacacattcttattcgaacctaacccaacctggtcccaattctatgcacctggtcccgagattgaggaatacattcaacgaacaacgaagaaatggaacctggacaaagacgttcagtttaacactcgtgttactgagaccgtgtgggacgaggagttgggaaaatggaaagtggtggtagaccaaaatggtacaatcacgcatgacgaggctgatattctggtcaatgcgtccggtttcttgaagtgagaatcagttatcctcgacatttctactcttattaacggcgagtttcctgctagcaaaaccaactggcccaatattgagggcctgtcgagtttcaagggcaagttgattcacacttcgacttggtaagtaaatgttatctatgaacccaaacaaatattaacaaccggtatagggataacacctacgactgggaaaacaagcgcgtcgcagtcattggtaatggctcttccggaatccaatgcgtggctgcaatgcagccgaaggttgccagacttgtcaactttgtgcgcagtccgacctgggtctctgtcaacttttgcgcggagatgacagcaagtggaggcaatttcaccttcacagaagaggagaaaaagaagttcgaggaagatcccgaggctcatttcaagtaccgaagagggttggagaacaggtaagttcaaagtccactccccgacagaggtcagaactaagtcaattccgagtaaagtgtcaatgcgttcttctttggtatgtataaaggccacccgatgcaattgggcttgacacaggcttctgcggatcaaatggcggagcgaatgaagggaatctccgacccagaagttgtgtcaaagatgctttctcatgatttccgtcctggctgccgtcgcttgtcgccaggagatgggtatctggaggctttccacaaggacaatgcgactctcacctttgatccgatcgaaagtatcacagaacatggtatcaagacatcgaaaggtgacgagcaagaatttgatgtgatcgtctgtgccacagggttcgacacgtcctttattccatcttggaagctggttggccgcaatggagccagattggaagagcgatggaaagtcaaccccgaggccttctttgcggtccaagtggagtcaatgccgaactactttatcttcaacgggccgaattgccctatctcccatggctcgcttttgaccgaggtctcttggacatgtgattacattcttcgctgggcgaaaaggattgctgaacatgatatcaagtgagttattgtggtcttcgtaggtccagtcgtatgactaacatatctcgcacaggtcaattgatgtcaaaaaggaagccatggaagactacaacgtttggtgccaggagttcctcaagcgtacggtctggtcggatgagtgtcggagctggtacaaaaacggaaagagcaaaggccaagtcactggagtatacccaggcacgattttgcacttcaaagactgcctcgaaaacatcggcggggagcacttcaatgttgactaccgctctaagaaccggttccgatgcttaggtaacggcgaaagtgtgcgtgatctgaatggagcaggtgatttggcgtggtacatggacgatttgaaagtcaccacaccaccactccaagtcaacggcaccaacggcaccaatggcaccaatggcaccaacggcaccaatggcaccaatggcaccaatggcaccaatggcacaaacggcacagtttgacctatgtcaagatactttttactatttaccgttgctatactctgtatttcactcaataaattgtatattctttttctcgaaagcggaaacccacagcacttacctcatttccttcaatttccgatctggtagtatgtgtctaccacatcatccttcgagtcgccttgagatacactctttccagccacactccgaatacgtgtacctgtagggggcgctggtgctggcggcaacatatcgagcactacgtcgaattgatcaggcacacaggactgacgttcagtcacaaaccgcaaaagtccccatacagcatgtcgagacattctagttacttgcgggacaatatggaatgggcgaggctccgggcggaccgtaaatgtttgcgcagggccactctcagggtggtggatgactacagccttcctgactgggggcattggaatgggtataccgaacctataaggcccatcgatctcctgaactctagcctggatttcatcccaggtcttccgatagtgagtttcgaaggtactcgtccactcctcgtcagagcgatagccggcgagaccagcgcacaaagaccataagaaatagttagtgttggtccatgtggaaatacaaaccgcccatgacctggaaggaagattgtgcttctgacgaacgtcacagcggattactggttgctcggtggcttgcacgacggcaatgggtacaccgtggatcgggtgaacagcctgccagttgtagttagctgacatgattcctgaatttgttctttctaggaggggaaagggttagacttgtaagttgtacttgaccactggaataaagggatcgcaagccctagagccagattactggaatagtgaagctggcggagcacttgatgcctatctaatttagagcaacgggggctttatatagcttttggagagtgggtttttattctatggtaaagaacaaagaaaaggacctttgtcttccatcaaagaggagacctgagacatccaaaaaaagcacgttgtcaacggatatttgtctccttattagaagatgcgagtaacaaggattctttgtctgatagtctctttgttctttttcgggtagactgatatttttctctagaatcaccacaatgtgccagtggcttggggcaacaatcgaagaaggtatttagataacaaagcatgcgcggtaaagagcatgattggtcaatgcgggtcaatgcaagaccgccccaaggttgatctgcagattatcgccaagccttggactgtcaacggcgcatggtatggccatgtttcgctgtggcttccaaggcttctcaatagtgatgcatctgtagtggttgcattatttttttttcatttatgaaagaatagtgcttgtaataagaggaaaatcaaagggaagctatcttctcatggaaacaaagaaggtggaatgggaaagaaaaggaaaaaaaagagataaaggcaagaacaaccggagttgaaccggaacagtccaggtagtggaagatcttaggcacttccctcgtggtacatgtaatgttaccactaggccacctgctgttgggtcttgagtagtacattgatgttccttttctcttgcaatttttgaagctttgcttatgcatatacattatctctaggtaagtcacctatgtgcatgtctaaatgaatagtataggtcacatgtagttctcgacattttgattgaattccgaagactgcgattatcaggatatagctaagtctagttcaatgagattgaatttgaggatttagtctattgttatataatgtcacgattgagatgtttactatgtagagaagacttggaagcaacgttgggagtaaggtaggccgggacgatgcacttgttgtatggttgacggcggaccgagcgccaaggcggttaaccttaaaataaagtggagacatggtctgtgcacgggcgcatgccaagattttcactgtcaaagaatcttgacgccaaagtcaagacctaatacataatgacacctaaaatcgtaagatcagctgatggcctactggtcggctaagtcccgagacggcagtccctggacctgggttttttctagtactgtgtcctggaactgggtgctaatgttgctatccgtaggctcggtaaattcaaaagacctcctcgatcttgcttgatctgccacgtgttacgatccaacgttttccttccttcgccttttttcttgtttgctagtttgcattagctagattgtttgctacatagtttagcgagatgattcgaagtttgcattgtttacaaagcggtcaggacacagctataagaactagctgtctcccactttgcaacttgcttccttcctctctctctatcttagttattgtgttcaatgcactctttgttgaaaagacctggcacgtcacaccgcgcgttcaattgaaatcgtgtaatcctgactttgcaaggcatcatcacggcccagagatttatggaaatcggcctggaggaatgaacgaaaaattggggtgtgtgaaattggggtcctgcaccctgctcataacctgtttcttgaccgcttggatacggcctggcacagagagacgggttagggggtactctcccccgcgcccttcggcctcgagagccaagtagcctggggcatatagctcaacatcacttgtccactgctgtcggtcacagaggaacattgagtttggaagttggttagcgtccttggcttgacagagaatatcgacgatcggtaggtagtttattgggctggtaggtcaaaggatactcacggcggattttggtgtctataagcaccccgagcatgcttgatatccccaaaacctgaccaattcacgaaggcgctcaagtatggcattcgcatattgaacgggcggacttcaacagattctttcacagtcccgttgatttcaaactcgacaattgtcaggcccggttctcagacctagttcatcaaccaacatatacgggcctaaataaccgagatagagtactttgccagtatgtgtaagataaatagaccgaagtctgcggtctcaagatccgcccagggcagataatcctctattgatggatcgttagtagttgctggattaaggatagcctccgatggcatataattatcgagtagacagtgcccagtctcgatatcatagttatacaacaggatcgcgaatttcacccatcgcgctcgatttgcaggatgggtctcatcaacaggggcaagagaaatcaggccgttaatatcgattggctgaagagtatcgtagagacgttctaatgcttcggctgggtatcgaagaccttaaatgggttcatttatattcgatcttggcccctctgtacctggaagacccataggtgcacgcgattggtacgcctgaataagggcaaaaaaaaaaaatttgttagttcaatggacttcggagatttggaccgagtggaattcacatcacgaaattcctgtgtagccgaagcccatttttccaccagttgccggcggtggtataactcatatctctcatcataggaggaacctgcgtttgctacagaaacccaattctcctggatgcatgttagcgcataacttaaagacgtggttgtttgaaaattcgaatgctctaagaacatacctgtacaaatagtaaccagcccttgacttcctctttgatctagtccagagataaatctgtttctgggtgtggttggatggaagtggggattccccctagccagtgctgaacggatctcggcatcatgtgtgtgatcaagttaggggtccaaaggtccaaggaacaaatgaatcaattaaatcaacgctggagggaacagaagagaactttggccatgtactagtgaaagcttcactagcggggcgcctaactaggttgggacgaagccgaactgaacatcgtagcgaacatcgtagcggatgttggaatgaacgactactttacattccttataactatcctagaatcatggaactattcaaccaaagaaacaatgccatggagcaatcacgtatcaaccgcctagaatccctgctgccgatgccacttttcctgccaacccttgaaccatggactatcatccaaagtagagacctcccaatctttcggaactaatccattctccttctgctcgtctgcccattccttcagcctaggaattacaacatgctgcacatgccaaacgcccttgtaatccatgaggttcttctttccctccctaagaagcttcaacaccaaacccggtacgccaggctcatcgcggaattccgtgactagagtaaaaagccctttgaaattgaaaaccaccgcaccggacaagggtagacgcctgagggtttgccagtctacccgcaggtgacactcgtcaatggccaagtcagcccgctgggattgccgattcatttcgtgagggtgcccgggtggcacgtacaatggctgtccaatttctatgccccaagagcctcgctgaattggtttctcagtcggcatcttggtgaaaaatctaaaccaagctcttttgttagcacttcgatgatattcaatcttctctaggaataagaccgacataccgatccattgagaactgcatcttctccttatagtccggaatcggctcgtggatttcatgcaactgcttcccaacctttgtcgcgacattccaccccatcgccgagcagatcaccgccgcgcgcaggaaatagaatcccgtcgtgtcgtcacgaagcataattgcgaagtcttctggtacgttgtccagaagaacttcgagaggcggcttggctgtgacatcctgctcggtaccgagaatcctgttttgcagcacgcgtttgtccaccagtgtgaagtactgcgggtatcgggcgcagatgaactgcaagaccatctccatcagctccttgcatgcaagttcggagcctggcatggaatcaaggacttcctttccattcttagcgtacagttccttgcgctgggcgatgcggctcttgtacgtgttttcgagctcgatccaccagtctgtttctagtttggtcaaggctgtttttgaacggagcacgagattagtttcaaatcatgattgttccgctttctacgagacatacacatggtttggtgatacgcccatcggaatggacgatatggccgaggcagggctttgtcgatgttgaattcgggatatgggcttgggagtggaactccactgagagtcgcatagtctggaaagtcccctagttgcttgacttcggccacggaaaatcccatcggtgtgtacttgtcgctcgggctggtcatatagtcggcgctcatgggtagaatgttccgacgcacttcttcttcgtgcacgtcgcgtctgggtgtagcatcgcaattaagatctgcaagtgtgtgtctgcgttggggtgggagaacattgtcatagctagatggggaagttgggcttgttgcagctttcttttccggagagaaagaccgcggtggagtttgagaagttgaatgttttcgaccacgcagtttaactctagccaggagagatctgccaaatgtccgattaatgacagcgtaggctccagtggcagctagaaggatgaatccaactcgccagagattctccagagtccacaggaagttcataacggctcaatccatacaagttagggcaaactgcagatggatggggattctgattcagtatataaaacttataccagcacagttgcaaaggggaggctttgcgaatgtattgagctatggacggacagggtccacagagtataaatactctccgggtcaactgtgggcaaaacatattcggatcttgtcgcacttggatgagggatgtccgatgcggggatgacattcgtatccagccagagtgacaagagatacgcgttggatagctgctttagtcctctggctcgattggatttgccgtgttaggagaggaaacgctggcggtcgatgccatgtcgacgtcacaggcggtttattgaaagtggtgttatgcttatcatgttacattttccagatgtccttatcatatattctacctcgtacgtaagatatgtaggtgcatacggtgcatgtagatcagttacgcaggtttgtcgaatttacacactagagaggtgcaaaatggcattgttcggaggtgatagtctagctgtcaactcactccctacgctgctcaatacagatagaaccccagaggcgatgtcttggatgaattggttctgcaaacaaacaagaaaagataagaagggaacaagtatactgaaggggaagcccttgtattgcccaaaagggtaaaaatgtcccgaggcttggcggcagatgactgtctgattatgggggaagcacctgtggacagcgcacagcactggccacttagacaaaactcactataacccgacgtgttagtcttgtctttctggcaacctctaccccttctctggagttatattttttgtacactgaaagtcatattggactcagtcttctggttcacagggactgattcgctcatccagcaaatccaagtcctccagttgtgatcgcggcggcagcttccagagactggtaccacagacacggtctttcgtgagaagatcgtcgatgaactgatccatatatgtaagcgtgaaagtgtcgcgcacccgtcgcttcagtttccgataatcgagaagtagtggttccagggttttgtagacatcgaccgggtcgaaggtcagtcgcacgtagaaagctgcaagagcgcgcagatatttgaagtcgcctcgctctttgacaagagcatcatctggatcttctgcctcgtcgccactaccggggtcggtgtagttgagtagttcgaggatgacctctcggtcaggcccgagctggaggagcttgaatgcaaggcaaaggaagggtgtcggtttctcagagacaccgtatgttccaccaatggaggtcaattcgactgcgcgatcacacagagtcgctgcgttcaaaccgaagcactgttccttccagtagtatgagtcggtgatgcggtcgcgcacagctttctcgaagagcgtggcggggttgacgccacggaccagggggcccttgtagccgcggttatcgaggaacgagctggcatcggcacgatgggctgccattgtggaggtgagagcggatgcggaagtgccaaggcatcaaagagaaatgaaaagggccacggctgtttttttgcgaccatcgcgataatgcggatttggaggataccgccttcatcaccgccttcatcaccgcgacagatcccgccaaaggtcttgtcatcgtaacattgctctatcattggtttcatttgaatcgctagcaggaatcatgtccatccatcatgatctagatgggcctccggatgatcactgtctggctaaaaataaacatcttggtcaaccaacaatgttgttgtactgacaccgccaagaccacgcttatcgatagtcgcgtggacaacgtaaacaacctgatgtcatgaaacaagctaacaagcccaacaataaccttggaaaacatgcttggggattgatagtccagggttgttatatttgaacatcatcccgggggccatgcatgtctgaaattctaattttgccttatcacattctcattattcatcccatgcagcctcccttgtggccatggttcttttaacatcctccacagtttcggccattgtgtcgatgggagtgatctgcatatttactgcattgttatttttctctggatatgtcctacagcagcaatctgtcaagagcatccagcatgctttgaagccccaggaagctgcccaaaaggccaggtacaggacgggccccgcattccagaagccactaaaacgaggtctatcagatacggggtatggggccgatgaagatataccaatcattgggagtcaacccaactacgactcgtctggaaactatgcctatctccaaatgctatccgaaccagatccatcagacatctgctctgcaatcctcttcttcaaacaactctctacaaaaggaacagccatccaggaccgcctcttcatgtacccagagcaatgggaccggatgtcagccaagacactgggcccatccgccactaaagtattatcaatattacgcgccgccagcgccaaatacaatatctggctcctcccaatcgacatgtcagcagctacagctgcaggctactcaacaacaaacagcaagctgctccacctgggccagatccagttcatgcagtatgacagcgtgctctatgttcaaacaccgggtctgttattagacaccggcaagttggatgacatgctcctggctcggcccctgcctctccgccacgacaagaaccgcccagagtcctataacaatgaggcgtggattcctatgccgcttcgtgcaaaccgcgaggcagatctcccgcctgtctatctcattactgtcaataacatcgagaacgggaatgttgaggcaaggactcatgttcccaatcttgcgttgcctggttttggtagtcttgtggttgggcctcggggagctgcaaaagcgttgaaatcagcagatgctgatcagcctggttatgtctatttcgatagcgatcgtgatggacatgttaagtgggctaacaatcccgactttggcacttggcgagctcagcaagctgaagtttgtgagggattggacttggacgaagtccttcatgatgagcgatgatctttcggtttttatatgacatggacttgtacatgttgtaaatataaaaggaactggcgttggtgttgtatatatttacatgacaattgtctcaagtgcaggatttgggtttggggcttttgggtacaaattttactgtctattttggttcaatatatcaatctcgcgccttcggatttcaagtcatgatattcgttcattatgtgtcactatgattcattaaatgtatgcttctgcatttccatcttacacagcttttcctattgcggcacaccgatctcgtaaccaaggaggacttcagtggtgtttccttcccagccccggttaccgctggtagagatcatgtaacggcatgcattatcgatatacagctgggagatagttccagtccgatgaccaggaatgatcaggaacggaactggcgaatggcgagaagactggtcgccttgctcgttttggagatcgtagagacggaggatatcgtgagaggcactgtagataagggaggttagaaaagaagttctgcattgtctcatggtcctttactcaccagacaagatgacgcccattcggcatggccttgagtgctgtcaccggcccactcccctgtgggaatttgaacgttcgttcggcagttctcaaacccttgtggagactgtattcctcaacagtgccattccggcgtccggcatagatgtagtttccgtcgggggaccaacaagcattcatacaccatggaggagaattatagggggtgatgcgagcgacaggatcaggctgtcgccggtcccaaactcggattgttccatcgattgaagcagccaggaacgtgttatcacttgtcacaccgtgctcttgttgggtattttgtgagaagtctggggctggtgggggtgtctcgagatcctctgctttagggagtccattgacaagaggttgcactgcgccagtcgggatgtccgcatcgtccatttccatttccgttttctggactggctcatccgtgtgagtatttgtttggttcgacaatgtattctgcgtgtcttgtacatatcccatgtctagttgagcagatatttcatcatcaacttctcctggcgcgtcgacatcctgcatagcaccgttggctacagctttgccaaactcgtcgtcctcatctaccccaaatactcccccggatggctcaccaccatcagcggctccgccatccgcatcaccaaataacgagtccgctccgccaaatagtgagtctgccggggatcccgcctgcgggttctcaaccgggcccgagtctccattgtcgtgagaggtatccatgaagttgaaattgtctgtaccaggcgcatcatagtttgatgaatatgtgccattggtctgttgcgcttcgattgtgtcctgggggactggaagggtggactctggccgaatctgcaaagcagatatttgtccaccgctaccaccgaaagcccgtcgaggttgaccagtattcagatcccaatcaaaaactcgtttatcccagcccccggagagcaatgattcttcatctgatgtgagattcagggaggacactgcagaagtatgttgccgcagaagcgcaatttccttgccctcttcgtggcgcagagtttgcagacggattaccccagattctaacccggaaagcatccataatccttcgctatggcaggccaaagagtacaccggtgacaactgggcgccatccatgttctcccagtatgtcatcaggactccagctttgaccacactatccacgaagggatgcctttgcgccacggttaacatgagcttgctgtttattgagtccgcccagttgaactttcgcacgaatccatccgatccaccggtgaagacccaacgcatatccgctgtcgctgtaacggtattgatcgaggtcgcatgcggtgcggcggtggttgggatcacatcgtaggttcgggctgtgaggcattcagggcgcacacttgggtggtaaatggagaacggttccaacacggagctgtcgccattgctatttgtgttttgttgaatggcagggccttccgacgcctggctcgcgttcgaagggctatcgggatcctgatccccgtccccgtcttggtcattttcattatcgccttcgccatcgtcgacgtcgcgcattgtgtcgtccatatcgttctcattctcgttatcagagcttccgtcctgggagcctagggaaccgcgagggtgattagcaaggttgagatcgatcggctagcggaccattgggacaaagaattgtcataccgcccatgtcacggtcctcttcttcctccattgaagccatgattaccgcgcctctcgtggcagtccgagttgtggggtagctatcgtttgcgcgcagcaattcaaacagggtggaagtttcggacaaacagctccgacacaaaggcaaatgagactaaggctaatggcggtgagattgagattatgccctagctccagagtacaagaacagagagagggagcgttgtgaagtccgcggcttaaaatggaccaaccttccgcggtgggaatgggtccgatgcttgacggaccaatgagcgtcaagagctactatatacaatctatcacatcaatttacattctatcctgcacaatagactgtatataattaacaaacttgctactatgttatatatacatatgtagtatatatgtaggatgttttttgtgatatagaacattcataatattgaggtttgactatataatgtaatcttatatgttagctgcacatcgggaatgcatttcttatacaacactactaggtagtaggcagtgggtatacaatatatcagatatagcaagcattgtctaaactttggtttgcctctctcttaaaaaatatactcccttttagtcgccttcaatcgcttctcactcatgcctcacttagtttcatacacaatccatcgtatgtccacctaatgcgtccagatccgcgcggcctgatagataatattcggcgctggatttaaccccccacgcttgatgccacactctcttctactccttctcatcctacgcattctttagacaatcatgtcccactttcgctttcagtatggtcatagacccaaggaacaggtcagaccggttaatcctgagatccgccagtacttcgacccagatctaccagtctacggcccttggaagctttggcaaactaagcccgagcttccttcgaccgaagagatcctcgggacagacgtatcaggagatattgtcgctcttacccccaattgcatttcggagccttgggtctccaaggagaaatacctagaggcccattatgcattgatccgggaagactcagttgcaccacttcgaaatgccgtggctcgggttcgcgctgatccttttatgaaggatactcaggatatctccatctatgagaaggtgagtactgctctgtcgttggatttcttggatttggatagtactgaccatctctttacatcaaaggtcttcattatcggtgttaccctagcccgagcgggtttggcgttgcacatccaattctcaactcgtcgtgcgggcaagaatattgcctggacatactctaaccgtcttaatcctggaacactcgtcgcccttacccccaagcgcaatgcattcttgagcaaatgtgttgtcgccgtcgtagcttgtcggctgctggaatcggttgagaaagaccccccagaggtcgatctcttcttggcctcacccgaggatatcgaggttgatccacagtgagcaatactatggttcagtggttttgaaagatataacaatactgactagtatatctcaggcaagaatggatcatggttgaggctcgagcgggatattttgaagcaaatcgacacaccttgacagcactgcagaagttgtcaaaggaaaggtcagcggcaaatcgtatctcccttattgaaatttacctgaccttatctagtttcccgttgaacgaacaaatctgcagcctggaggaagacattgatgcaccaggatacatcaacaccgcgccatccatggacttctcgccattgtccgaagtctctggactcgatgtcacgaacaaatacgacatcctcgagagatggccctcccagccaatgggaaagctagatgcatcccagtggtcagccctgaaccgaatgttgactaaaaagctggccatcatccagggtccccctggaacgggcaaaacctttacctccctcgctgctctgaggatgatgctctcgaacaaagggcccaaggatccaccgataatcatcgccgctcaaaccaaccatgctctagatcaacttatcaagcatatctcggtgttcgagaagaactatgtccggctgggtggaagaacttccgatcctgagattcgcaagcacactccttatgagatcagacagaaccagggtctattgacaattgaggggggcttgatggctccaatgagaaagaaacagaacaaactcgcggctgagcttgagaaggtcctaaagccacttgcgccatcaaacagcaacaagccccttgcagtatctctatttctggagcatggtcttttgagccaagagcaagttgattccttgaaggaagctgcacacaaatggcagcgatccaacactcctgcaaatgccgatcctttggcggcttggctttcagactgcgtgaaggagtttgactccgaatacgccggtgactttgggttcatcgatgatgatattgacctggagtatgagcaactcaaagagatcgaagtcgaacacggaagatatgaggatgactggtcgtctttcaaaacacgctattaccccttgtcgggtggtctttgcagctccaacaccgccaaagtctctcgggcaacagttgaaaatctgctaaaagagaaggacttttacaaaatccacaagaggtatcgcggtgctgtctatggctacctacgtgagcagctgatggttatcctgggagaaaatgtgcagcgcctcgctcaaacctacaaaaaatgcgcctccaattttcaaattggtaggtttgaacgggactactgtattctccaggaggcgaagatcattggaatgaccaccactggtctgagcaaatacagaggactggtctcgagtttgaaaccccgagtcatcttgatcgaagaggcagcagaagtacttgaggccccagttgcagtcgcttgtcttccgtcacttcagcatcttatccttgttggtgatcaccagcagcttaagggtcaatgtgcggactatgaactgtgcgggcaccctttctacctcgatgtctctatgtttgagcgtctgatgataaacaaaatgccatacgccatgcttcaagagcagagacgaatggtgccagaaatcagagagctcgtggcccccatctatgggaatcttcttcatgaccatccgtctgttggagatcacccttttgttcctggcatgggagacaagcgatcattctttttcgaccacactgcgcatgaaagcaacgacagtctgctatccaaggtgaatgactttgaggcatcaatggtggtcaatcttcttgcctacctggtgatgaacaaagtcccggcatccagtatcactgtcctgactttctacaatggccaacggaaattgatcatgcgaaagaaggcacagaatcccaacgtcgccaaaccatacgtcaatatagtgaccgtcgactcataccaaggagaagagaacgatatcgtcatcctctcgcttgttcgatccaatgatcatcgaggtatcggctttctcgcgcaggacaatagagtttgtgtcgccttgtcgcgcgccaaatacggtctttacatatttggcaatgcacgatgtgttagcaaacacagtgagttttggtatgcagttactaatgtgatgtcggagaaaaaagaagaccctcgtatcggcccggctctgcctctgtactgcacacgacacaaccaagaaaccctcatcgagagtgagtccctgtcctgcctagtgatatcaacggaagagatgatctaaccgtttttctagctctcaaggactggaacaccatcggtgacggctgcgacaagccttgtggcacgaatttaccatgcggacatccatgtccccgcaaatgccacgggtaagtttcgcgaataatgacagtttccatgcacccaatactgacatcttgactcattagttccgaacacgactgggtctcctgcaaacagcgctgccgtgaaattcgcgagtgctgtaacacgttctgcatttgtgtgtgctctccaccacacactcacgattgcttctgcggtatgggcaaggacaacaaaacccagatcttcgacggcggatccgactgggatgatgtcgatggcgaagaagatgatcgcgacgaaaaggtcggccccatcccccggacccgagccccaacccgtgcctccgcctctgcctctgtctctgcctccaccgcagaagatacagctcgttgcgccgagggtgtacgccaatggcaggcgtttgcgcgtggtggtggcgtgttggatgattatcgtcgggctgggcttgacgctagcgggaaacgtcctcagaaagatgctattccagttgaacagaacgtggttgctccggttcaaggcactcttatcgacttcgacgatgatgccgatgatgccgatgatggtcaggttgaagttctgggtgcaggggaagacgccctggctgagaggggcatcttcgcacgtgatagtgatggtcaggtcgaagctatgagtgaagtacaagacacgcctcctactctcgacaatgacttgataaacttcgaagaggatgatgatggctaccaagctgaaggtgtgagtcaaccgataatgcggcttccttcgatgcggcttccttctatgttagtcgaagtttcgcttacttccagggtcgaggaagtcgcggcgtctccatttgggggggatctgatcgagctttcctagatgggcggcaggcgtcactttgctatggtttttgcttttgctgggagggtagctcagtgaatgaactggggaatcaggaagataatgggaagaggatgatggaaacagaggaaatgatgattcgggatagcagaaaaatataaaagcacaaaaaaacacaaaaaaggcgacgatcaaagtcgcccacctcatgagttcatgaatacattattttccagagactccaatatatacaaacgccaaacccatagatatgtaatgtcaacatcaaatcatacttatatactcttccaagctctgcccaagaacattaataaacggccactgagtattcgttccaaacaacctagcccacagcttaagaacggccaatcccaaagaagccggttccagatctggcggcgcctcgaagtcatctgtatcaatagacgaatacgcttcttcgatgatacagcgggtccagcgtaggatacgactttcgttttctgcagcattgttagccggtaaatcatgcagcaggatatggacataccactcaacgactgatccggtcccgcctcggcaagggtaaacagccatttgcttagcaacactgcacattctatactggctagcgagtgccgcacgctccagaagaaggcttgactacgagcaatgtggtctatgcccagacgcacggggatgctgagagcatgagcggcgtatatgagtgccgggatgagacggtagctgcgttctgggcgtggggagtgacagagtgctgtggctattattatcgggtcgcgggtctcaaggcggcgatgaggtccgagatttagagataggcggacgtaagcgagtcctaggaatgcactggaggtgaatgggattggaccgttttcgttgtgtgggtctagactggattctggggcttgttgccatacagaggtccaagaacggagagctcgtctatgggttgaatcgttagaagtgagtctaggaaggtttatgggtagaagacttactctagtttattcagttcctctgttgggagagttgtggaatggtttccgttcggtaatgataactcgctcacgagatggattcgttgcaggagtccgtgtaagaggatatagttacccaatggagccgggatggggtctagtggtttggctgatcgggacttttgcaagaggagggtcaatgcgtcttggaagaacaactgctggggacctcgttcttgctgggctgcttcccattccgcggcggtgcttgcagtccattcaatggtagaacacggaagacgcaggtgtatctcattgctgcgcaaagatggataagcattgtatgcgacactgtgaacatggataaagcagaacgcaatcaactttgtgcgtcgcgccgattcttggtccgcccattcgtaccagtcgaggggtgcgcgtgggtcagagcgtgttgtgtcttctgtcaagccagcctcacggagatgtcgaaccagcaagccctgaaggtggaatgcttcttgtaccagtctggcattttcccacgtggagtagcccatcagaataaggagacagcgggtaatttcgatctgcttccaaccagcagtagtttccgctgttacctgcggttgcgtgagggattgatcgccaaaagtggaataaggagatatccccagcggtactcgagggcctgaattgtaccctggcttagctgggaaatggggctctctggccattcgttcaaatagaactgccttggaaacgtggaataatctttctgcgttgcggtgctcaaatctatactgggctccgatcgtcatgatagcaagaaccacctcaggggcacgttcattgatatagaaagtcgggatatggataaacggaagatgtgggtggaatccttcaaaataggaagtaagataccgagtcaatgtgtgacgagatggcagtgcgaaatccggaatcacatggcgaaattcttcgagagatgctgcaagacgaaaccgctgctcttcggtgacattgaatcgtgacggtggtctcttcgcgtttgggggcggttctagaatgttgtcagtgatctacagagtgatagcaatacaaggtgtcatataccagaatcagacagggttccaaggctttggtcgcccctgggcacagatggaagccaggatctgaatggtgagtcgcctcgagaaccatctccacttcgtcgtggccgctcatgctcttgggtctgtcgacccgtttctcttacgtcttccaggttaacctcttgtgtttgagaggtttcaccttcactgggaacccattccccaggcaagccaatcgaatccaagaaatgtgtgaattcctggaaatgatttagatcttcgggcaagtagggcatcggttgtcctattttgtgtcagattaatagatttcttataatggcagtcaagcgaaagaccaggatattgcatattgcatattgcacagaacattaggagggatacttgaacgacaaagaaaacaacgtacctgtaggtcgataatcgcctggaagaagcagctgggcagcttgaagcatatccggatcatgcaccatacccgtatggggatcaatggctgggtttgggactcctgcagtagcagcgggaagcatgccggcctgatgcgggtctaaataaggcgtattctgtgccccagcccattggtgcacagccgatgaccctgcaagggattcgacgggtacgggccgagttggtgtatcatattgcggcgggatagctgcagggtgatgcgttggctggaaatccgccttggtttgctcgggcggcgtcggcgaagtcagcccatcttgatgtgagatgcgcgtatgacgctttaacagatcccttctagtaaaggcggccccacagaagcaaataaacggcttctccttggtgtctattttaccgggttagcattagctgtggggatttccccgggttttgcttacgggtgcgaatgtgtcgctccaaatgttcagtccgccggaaactccgaccgcagtgtatacatatacgtgcccttgctccacgggcacccctgtgcggctggggtgatggagacattgaagggggtatggagaactggtttggagaagaaaaggccctggttgagcaagtggatgtcgagatgggagattcgaccccaactcctccaactcggggcccgccgggacgttcggcccgcgataagcgataagggaagatttggagatgctcggcagaagtatagaggcatggagttgttaatgtcatattcagatgtttatcgctgttttatcctattggaatggtctaataactcctgaatacgtttcctggggttgtggtaggtggtcacgtcacatagtggctcgttacttcatcatcctacttactccgtacatactgtcattcttcaaatgtcctactataaagtactctaacaaaccagtacatgtctactttgtagtgtatggatttcacgttggatacaacatctaccctaaatctaccgaacgtcctcgaggaagctcaataggaaatccacaataccatcctgattcccatattctagtgcgatcaatcgttagaggaaaagacgttcatatagaaatatagaatttggtgttaaaagttaaataacaaagctgtcaaatcctcaaaatacaatctcactggacttctaattgcacatctcggcattgtggagttcacaagagcagcgataacggaaccttggaatgtcgtaaatcgagaaacggaactcatcgcgtaaatgagcaagtcagcagtggaattgtctgtcagttggagaatgccgggatgaggggcttatcttccccgccttcttttggtccggtttaaaagtcaacctcccctggcaatttccctcccaattttgaacaatcattcaataatggcaccaaagcgagttctcattacctacggtgtagatgttgatgctgtagccggttggctaggctcgtatggtggcgaggattccacaaacgacatcagccggggtaggtttcaatgttcttttctacattctgctcgctaacaatcaattaggatactgggcagggacagttggaacccaacgattgttgaaactgttcaagaaatacgatatcaagtcaacatggttcatccccggccactccctcgagaccttcccggaggacatggccgcagtccgggacgcgggccacgagatcggcctgcacgggtattcccacgagaacccgacggacatgtctctagagcagcagcgtgacgtgctggacaaaacataccggatgttgaccgagttcgctggaaagcctcctcgaggaagcgtggcaccctggtacgagtcttgaatttagatttagcaatggtgctaatcagatacaataggtgggaaactagcaaagaaggagcccagctcctccttgactacggcatcgagtacgaccacagcatgagccacgaggactgccaggcttactacctccgaaccggcgacacctggactaagatcgattacaagcagaaagctgaaacgtggatgaagcctcttgagcatggatccgaaacagggcttgttgagatcccgtccaactggtatattgacgatctaccgccgatgatgttcatcaaggacgcgcccaacagtcatggttatgtcaacccgcgggacattgaggatatctggcgcgaccattttgactacttctaccgcgagtacgatgagtttattttcccaattactatccacccggatgtgtcgggaagacctcacgtgctgctgatgcatgaaaggtatgatgtgatcataaatttgtgcagagtagggctgacattcgataggcttattgagcatttcaaaaagcacgagggtgttgaattcgtgacaatggaacaggtttgcgacgacttcaagaataagaacgctcctccgcctggggccttgatgcccgctaaggctggtgcgatgttggagaagtgaacatatcatctgaggtattaacagtatattatcacagcctcttagttggactacaaaatctatcaatgagaatagcatttgctcgtgtcaatagtttatcccgaggtccgttgtggtcaaccatcaaatgacattaccccaaatcaatatacggagctatcagcgctaagataactagagctatcggatagttaaactgattcgaagatctatggatggatctccacgtctctattatcagaaatgtctaccccaacatagataactgtatcctatgtaccccaactatatataccccaaatcaagtgctgtgcaaccacccaatcatactctatcgcggacaaggcaggtcattgataggccgattgatacaaatatcacaggtgtatgtctacggcgatctatatgattgtcgcggcgtcgagtataatcggcgtgtcgataacgtccaatgctccgttgctgcattttgtctgggctgtcaagttctaccgatcgggaagatggccattaatacggatgcaaaatcgcgcaagttctcatatatcgggcggctcacgtagcttggactagaaatggttatgcataagtcgaaagaccacccgaaggctagatatcttaacgtagcatgagcttggtaaccgccccctatccttcagcctagagataagcacctctagatagatcgtgtcggcggtgaaaccataaactgatcgcgtacggcatcatgcttcgagacctgatcatcggtaaacagcgtgtgtgcagcctatctgcagggtattgccagtggttagctgccgtgcacaacgggatcttggcttggcgtatgtcttggcgcaggtgggaagcttgtactattgcgccactagcgcttagccttgacaagaatgtaaatccgtgctccgtctatcgtaggtcattggaggaataatgaggaagttcatgacctccgctgtcgggtcggcaaaatttgcagagttatcaacgaggggaagttccacgggtgcgttagaccatgatctattggctggcattacagcgctatacacggctggacggatagacccttaaaatgagaaagataagggcctagaatgatgctaaagcagactaaaccggactaaaaagtaccataaagtgtgcgaggacctccgtttccgtttccgagtgtgaatccacgtgctcctctttgttcttgttatctcttaactagttcccatttccttctcacttactcttcttcttcttctgtatacctcatatcctcttgtccagacgaaaaagcgcgttgatcttatcaaatttccaccgcgcgtctacgttatcaccgggtctatcagaagatggcccgcaaactggccctgctggtcatattaatgcacgcaatccaaatcctcgctcttcctactccctacgaaaactcgatcgcattcaaatccgttctgtctggcattacacaaaacaatcgccactacttcccagaaaccatccccgatcaagatgagctcatagtcatgctgaaggagacagccatgcgcgaagcaggcttcgtgctctcgtcaaacccggacccgcaatcaaaggagcataaaacggagacggagcttcacaaatcacttccgaatccgtatgcagcgatcggcacggatgcaacggcaaaaccacaaccgaatagctacccaaagccgagacaatccaagtccaagtccgagtcccgtgtgaaggagtctttcgtggtcgcattaggatcatacaattacccgatctactggccgccatttgggttcttcgttatcgcggctgcggttgtgtgtttctgtacgatactgcgggggatccgcgcgaagaagtgaagaatgcgacatgtgactgtcggattaatatttatgttgaaagactttcttttttctttattcgcttctctacggagagaagcgagggattgattctaccaaggctatgcggttacccgttcagccttgggagctctatcctttctccactcggtcggaggcttgtttgattacggtgggactccaggccccgttccattgaatcgaatcgaccctatccccgataagcgatttgaaatacgccgcgaccgatggggcaattctagcgctgagatcagagccggatgtatatcctggatgactcgggcaatactccgtgacgaatcgttcgaatgttcgtgatccgaccacctttcccgtcccaactcgcgacgagcatacgacgagcaatgcgaatgccagtcgaggagatatcgaagatggcatctggaacttgccgaagaagaagcagcttgggtgttgaagaagtggcaggcatgttcagattgagggtgggattttcatccctacatgcctcctgtgtcaaatgactacatatttgttctgaatacaaatactttgatgaatgctacactaaaaggaaaaactacaaacttacctagcacatggcccatagtagtaatggtataccacaagtaatattgcaagcattttcattctctaccagaaacataaattccgacatgtgccaccaagaatagacgtaaggttacaagaagaactcggaaatgatgtgatagcaggtacatgcgcgaagcagaaaagaggacaaaaaagacaagaaagcaaccgaagacgccacaccggtgcgagagtaagaagccagagcagaaccatgataacattggaacagatgataatgatgataaagcctcccggccaggaaatgatgattacatttgtgtctctctcgctctcttttttgcatccccgccccgaggaatgagcggggggtaaaccaataacaggtagtagatgaagtagggggtaacaatgaatatgtacgcgagagattctatagatagggaaaggaaagaagaagggagccggtgctttaacaatcaccgacaagacgcttctgcgtccaagcgcgttgggccccgtctagaagaacgtccatgttgccgctgttctcgcacatgccgcggaagacgccgtcttctttgttaatgagggtccaggggtggtcgtactcgacaacgcggccgtggtcaaggacaaggactttgtcgtagtcgatgatggtctgcagtcggtgtgcgattgtgatgattgtgctgttgctcaattcgcggagggtctcttggatcttggcgtcggtggcgtagtcgatggatgcggttgcttcatccatcatcaagacgcgggggttcttgagcaaggcgcgggcgaggcagaggagctggcgctggccttgggagaggttggagccggactccgagacttggctgtccaggttgtggaagacgtttttattatcgactactgtcactgcgctgctgttcacgccgctgccgttgatttccgtcgcggtgcgactgcttgaggttgtgggggttgcggtgcctgaggtgctggaaccgataaggtgcacgcgacggagagctgtgaaaatctgttcgtcactgaagagaccgaagggatcgaggttgctgcggagggttccggtgaacagggtcggatcctgggggacaatggtgatcgactggcgcaggtcccgcagtccgattgacccgatgtcaacgccgtcaatgatgatctgacccttctcggcctcgagaccgcggaagagagccagcgcgagagaactcttgccagcaccggtgcgaccgacaatgccgaccttttcggcagcctttacagagaacgaaacgtccttgagaaccgggtccagatcgggtcggtaccgagtagtgtagttaatgaactcgaccgcaccttggctgggccaatcagacgcaggtcgtgagtcttcgatgacagaagctgcttcctggtccacattaaggtattctctgacacgctcgacagagttcatgttttgctggacctcggagtacagacgcacaagccaaaggacattctctgtgaatgtgacggcgtaggtcagggaaagaccggcagcaccagcatcgatcgttccaacgttcaataacacaaaggtagccgagaagaacgagactagagcaccggtccaatcaacacggagggcgagccagcggttgctagcccagaggtagatgtgtggccggttgtaggcattgatgcggcggtggttgtcgaccatgaagcgaggaccatcaccataagcacgaatggtgacgataccgttcagggtctcaccgaactgctgatacaagggactgcgctggacagattccagacgcttgaggtctcgcgaagagttcaaataaacagcaccgagggcagtgtacaccaaagtgatgaacacaccggcaatcaagaatcctggcgtgatccacgaaatcagaatgacaatcataatcacagatgccagactgtggagcatgccgatagcaacaggagcgacttcctgatcgacagactcaacatccttggagaaccggttcatcagttgaccaagaggcgtggagtcaaagaatctgaactttgcgtgcatgactgccctgagaaggcgatcatgaatcttccatgatgcatggagcgaaccccagaacagaacagcttcccgagacaaagagattgcgatatagaggaatcccaggagcgcatagacacccaggtaataagccacgttcacctccccatcagagttgccggaagagcttgcgccaaattggggcagaccccagctgctcatgcgcccaacacttccaatgctgaaggtagggggtttgagatgggccgcggcggcgtactttccgacgtcctcggcactatccttggacgtatggtaagaattcgcccactgtctgatccagatgttggtggaaacagaacccaattgctgcaagacgaatacaacaacagcaccaacccaatagtaccacgggcccatggcacggaggtacatggtgacagtcgaccacttgacactaccagtagccttagattcagtgagtttggccttgtcttctacctttccatttggagtgccgttcaaatcttcatcatccgattcatggttcgatggggcacgggagagtccacgagagctgggtcgggaattgggtcgagacttgaggaactcatcgcccaatgcaccagtagcggcgacatcgttgggacggccctgggcggaaattctgccgtgttcaagtaccacaacgtgatccgattgggggacagtcaaagcaacgttatgggttaccaaaatacatgtgcggttgaacatcagagggccggtaagagcttggcggaagatgtgcttggcggtatgagagtcgacagcagagagacagtcatctagcagcaagtggcggccactgctgtagatagcgcgggcaagagagattcgctgcttctggccaccagacaaactaatgcccttctcgccaacaagagtttgatcaccagcatcaaggatagcgaggtcacgttccagggcgcaggccttcagcaccgcacggtagcgacgttcatcatagggagaggcgaagatgatgttttcctttacagtgtcgttgaccaaccaggcttcctgggcacagtaagcaatgctgtcaaccagaccagtttcagggtccactgggagatctgccctgttgggcattccaccgggaagatgaacacgaccctcgagaagtttcatttctccaagcaaagccatgagcagggaggtctttccagatccagtcgggccaacaatgatgttaagcttgccgacaaggaattcaacgtcgacattgatcagacggaaagcctccaagtcggcatcagcctcggtatcttgggaatccccactggagctgttccaagatagcgttgccttttcaagaccaatcctggcaggtgttcctgtgacagtactatcacggagctgatcgtatttgcttgtttcctcctcgttcaagtacttgtccacacgatctagagaaaccttacattcctgaacgtgtgccaccatatccgcgagctggtccaagggtacccgcagcaaagagaacatggacaaggcagggaaagcgatcgaaggggtcagttgttttttctcgacaacagtatacaagaagaaggacatgaacgtgatgagaataggcgtgccgtaccagacggttgcggcggaggaccagaggatgtatcgcttgcgcagggctttcagttcggtcttgcgcttctcgccgacaatgtcttggaaccgctgctcccaagcaaagtacttgatgatgcggatgttttggaggacttcgttagtggcgtgaatacgggcatcggtgcccttcaaaatctgattctggaccttgttgaactggcgggcgatgacaaggttgataggcagcatgagcgccatcaaagcgataccggcaaatgagctgaaacccatgatgtggtagagcagaataatcgccattgtaatctgcactggcacactagcccacaagaagtggagataggcaccgacctcgctcaccttgaacgaatcgatcgccatcaagttgataattgtgccaacattggcctgtgtaggttcctccgcaattgtctctggcttgttgccagcctcggcatcatttccattggcggcctgcttcttgcgaccaaaggaaaagagctttttcttcttattcttgattggatcttctacgggtttcttgacctccagtgaagcgcctgccttgcggcgaagagccttggcataaatttcaccaataatgatcgcacggattttcacgcccatcttacgaccaataaataaggcctgtccatctgcgacaccctgaaccgcggcgcaacagaagagcagaatggcgaacaaccaagccgcgctgggtgtggtcgaccgaggatcttcgacgtactcgaggatggccttgaggagtagactaggcatgaaaacgaatagattggcgaagactgtccaggcaccctgctttagaattgtccccataaagtaccggatgagcttccatgccaaagagcctttcatttgtctcttgcggaattctctaagcacgtgcgcagccttctgagacggggtcaggttccaaacatcctcaatctccaggggttggcgataacccttcatgaccaaaggatcgagccaggcaaatgtcgcaagagataacaaactggccatggggtatgtcggaggctccaagccatcttcgcgttcaaccagaactggcttattgcctcggcgagtggtgagcgcaatgagcagcaacaccgtactcagagcgaactgaatgctgctgaaaatcagggcttgctgggacacggggtggataatggcggatcggaagaccatgatgttgaacaaccactggaagctgtacagaatcgctgtatgggtccagattctcggcgcagaggaaaggtccatggtcgataggaggaaacggaccagcaccaagaaaaggatgtaggcccacgacacaagcccagccacggcggggagggttccatgtcggccccagccgtgagtcgacaaaacggcgatatagaccccaacttgagcaattaaagctgcgatctcgagtagtacaacggtgatctctccacgcgggcgattgacctcgacaatctgagcttgttcttgttgtacagcttggaacaacatcgtatcggactcgttttcctgcgatgcactggggacctcatcttccgagtcattgttcgggagaaccttgtaagcgacacctttttgagtgaggatatatcgatgagcgaggcggattaggatcaccagcagcgaagtgccgcagactgtgaggggaagtatgacctgaagaacgctattaagatacctcatgatcagcataaaatttcaacgatcggaattgccatcggtgtagacacacttgcgctggaagcaacgagacaggtcgtcaatggcccagacggggccttgacattgcggtaacatgttgaccgggaagctcgcagaaactgaagctctcggacctcgcgcgactcgatcacacagcttttcagctggcgacagtgatgaatgggtaaaggcgaccggtattcggttattgtgaactacccctttagcaacaagacttgactgaaatgctggacaaggctagcattgcaaagtcgaggtgaacagtgacgctgggataagggttccgggaccgagtgccgttgaggcaaaagagtaggcggggaaggctactcagattctgccgagcaagaatcaccgaagatgttcacgagggtgttgagatatggatctaggggcgggggaagaatcagagagtgaaaatgccaaatgttccaaaaccggcggtggacggtgaacggactccggtaaagggtgacattagccaccaccaaggtttggtggtggagtgaggtaccttatacccaattaacagtattttctgcatacggagtttttatcacaatgccattattgacttaactccttcgggagcccgatgggcaataattcctgcaatgtctcaaagtattcatctgacctgtctcaatcagcttatcgtgctccactataaaaggtatcgattttatatggagttacaacgaactcactacaatatgtatagaagatgtccaagtattcaatcaaaatacgtacaattcagtatgtatcagtggtttatccactcttcctcctcataaacgcctcatggtaggggttcatcttaagccaagcgtctggattgaaaacgcgaccagaatcgagataacggagttttgttgaggctttgctacatgccagctattcttcttttgacaagggcgttgctcacctttaggtatacacaaataatgagcttcggcggcggctttgctactgtctacaccctccaggtaatagtcattctgactcattcaacagccgtgagatcttttgcattaagtgcgtatttagcatgaatgatgaaccattcgaaactaaataggtcagcaggttttatcttgaactgagaagcagaaccgttggtagaacagtaggggagctcgatgacgaatcaatcacatcactacttacctacccctagagacatgtctctttgaatcttgttatatgtatacaaagcgataaaaagcataaatcatacagtactttactaaacatgatcagagatatctgataggaaaaggcctctcgagaagagtcactcggttgccttggggtatcgctgcaaccatccctccctggtgaatcgctgcccgtgcgtagcgagaagagcttcaattttcgcttgtagttctttatgtcattgtaagtcagtacttgtacttgtattagtagaccatattattagtaccttcgactgtcatctccttccgggcttgtagagagtaatggtcgcgaaattcgtggacaagaatgaggtcgtcagggagatgggttcctgttcagctcagtcaatactgcgtagggggaaagtcttcgaatgacccaagagaaacagaccagccataatagcatatatgtaaatagtgagaccaccccaggctttgacagtgcgaacgaggttctgctgtgtcctagagttggggcgcatggaagccccattaggaactgagatagattagcgacgtgagctgatcgttttgactatcatgaattacattcataagtggctgggttgagagccttcggttgtacttttcctgcagttgtaagaagatcgaatacgccgtgtggtcgtcgtggacctggccaagctcggagccggatggaggtgcctgagttaacgcggaatatatccttgggaaaccgagtgaaggattgaatgaatctgttatgcgacatcttgatatatccttgcagggatcaggcgagggtgtatcgagggttgaggtaagatagcaaagttgcgaacttagcaaccccgggaaggtcacctgcaagggcaatcacatcactgctacggagtatacacgaattattctgtagttaaaaaagagatgagtattactatacaccccataaccccattttttactttctacacacctttctaaactacggagtacttcgatattcatttcctgagtctatttttagagattactacttaagagtgtggacaagaataactatataacatctaacaaagacagttaagcattaatttaggtatgagaatcaggaattcaagcattaagagttcgacttatgaatcgatataggaattaccacattgtatactccgtagacctgaggtggcgggcatagtggataaacgcccctcttagtcaggttgccactgaaatttcaggcatccgttgatctaatcagcatcggcctcgcctccccgtgatcccggcattgcctacggttttataattcattccgctttaacttcaatttgctccatttgcataaggcacatggtgctgcctcggcgtcgtatagctatataaggtagattgctcccttacaattacgagcggaatctctccaggtgcaactcttcagatcccgcttatctcgtcatggcggagcgcatcctcatgaacgaattcaagacccttctcaaagagaagtgggttaacgttcaggtcagtttaccacttcacaatcgcctttgacacttccacacttgcaggttattgacatactttgtgtagttgcatgatgacgacatcttcaactgggatgttgccctgatcgtgatcaacccggactcaatgtactacggcggctacttcaaagccgcaatgtcattcccctccaactatccgtatgccccaccaagtatgacacctcctctcctccttctcatcttcaaaataactgacgagattcttcttaccattagagttccgcttcctgcagcccatcaaccacccgaacatctacaccaatggcaaactatgcatatccatcctccacgcgcccggcgaagatgaaatgtccggcgagcttgcctcagagcgctggtcccccgctcagcgcgtcgagtcggtcctgatctccatcatctctctgcttgacgatgccgagacttcctcccccgcgaacgtcgacgctgccgtcttgctccgcaaagacccagaagcctaccgccagcttgtcaaggccgatgtcgagaagtctaagctcgatattcccgccggcttcgagatgccaacacatgatactcccgtccgtgagcccgtggagaaggaagacgatgacttctgggccgatagcgatgccgacagcgacgtgttcggtggcagtgactctgaggatgaactcgtcatggaacagtccagcggcagtgatatggaggaggacgaggatgagtcggccgacgatgattccacggagacaaagaaggtgtgatgataactttctgcgtctttcgtctggggaattgttgcatgatcagccatttcaggtctgcttctctgagcattttcagcattctcggcgtgcccttgtcatctttcatacgataggcgtttagcgggatcattttcgaacattatgggtcttatggtttatgataacatgcaataccctaatgttgcacagatattttaacgaatcaaatcaaattctaacatcaagatcgactctaaatctctatcacatctctatcacactttcaccctacctacgtccttacttcagttcagccaagccataaatcttctttgcccagcgaaagtggactctcctccgcctccccacagtgcccccacctataaacccaagcatttacggttccaatatatgacaactaacttatccaaatatcatatctaggtatatctacttacccactgaacccaaccaatcccaagatggcaacccaaaacctcgccacctggacagtctccctgtcctatcccgacctcccaggggaagtaatcgacgcggccgtccgaagcttctacaacatagccgggtgcatagtaggcggcagtcaacacatcgcaacaagcacggcccgcaaagccctatcccccttcgcaggcccaccaacctcccacctcccgggcacaagcacctccacagacgccatgcacgcagccctcttcaacggaatcgcctcgcacgtccacgactacgatgacacccacctggacacagtcatccacccaacggggccggtagcatgtgccctcctcgccatcctcccgacgctcccgcgccccgtttccggaccggagtttataaccgctctggtggccggtatcgaagccgagtgtaaggttggcctggccgtttggccggcgcactacgatgtcgggtggcatatcacgtcgacgactgggtcgattggtgcggcggtggcggtggcgaagttgcttgcgttgtcggcggaacaggtcgcgcatgcgattggtctggctgctacgcaggtcaccgggctccgggagatgtttgggtcacatgcgaagtcgttccatcccgggcgagcggcgcagaatgggttgcttgccgctttgcttgcgcgggaggggtttacgagttcggttcaggcgttggaggcgaagagggggtgggcgaatgttgtttgtgccggcgggaatcggattgaggaggaggttgcggcgctagggggtggggggcgctgggagactgtgaggaatgcgtttaagccgtttccttgtgggattgtggttcatcctgttattgacgggtgtgtttggttgcatggggagttggggcgggttggggttgatgcggcggatgttgaggaggttgttgcgagtgtgcatccgcttgttctggagttgacggggaagacggcgccgaaggatgggctggaggcgaagtttagtgtttatcatggtggcgccgtggggttgttattagggaaggctacgccggcgcagtatgaggatgatgttgtacttgatacgcgggttgtggcactgagggatcggttcagggcggtttctgatgagagtttgcgggctgatgagtgtcatctcgttgtgaaggtgaggggagggactaccatcgagaagcatgtcgactatgccgtgggtagcttggagcgccccatgaccaatgaacagctgacagcaaagttcattgagcagtgtgttggggttctaggagaagagcggactgacaaggcgagtcagtggtgttgggcgttgaaagaacaggccaacgtggctcaaatcaaagatgtgctgtagattgactatatgttggtacctgcatatacttactaagagtttaatgaacctagttatcttacagtgtcactgtgtaatgccggacaaatattggtttgataaatcaacacgtattctatatcagtccgaacttatggttgtagacaagtatgctacgtgaagcaacaaaatagcaaaatagcaaaaacaatctgtgtataggagcgtaatagcggtataaacccgcggattcgtgttggagaatccaaaaaaccgagataaaaccaaagaaaatatgttgtacgcctgtgttaatccattcatccatgcccaagttgttgggtttgtcgcagacagaaccctaacaacgttctaatctatgcagagacagcatccttgatctcgctgtagatagcgccaagctccttgtggaaagccttctcggcgttatcgatgatgctgccaatgcgctcctcaacactggtctcatcctggtgggccttgtagccacccttggcaagaatctgagtgaagttggcggagccaccaccgttccaggccagaagctaatatagagttagcctaatccatgcttttctagatatggtgggaaacttacgttgggggtgtcggagggaatgtcagtgagtgtgccctcggtggcgacgctgataagagcagccttgagctgcttaggggtcacatcggcgacggcaaaggcagagtccttggcgggtgccagggagacgtagtaggccagcagaccggcgatgtgaggggaggccatggaggtaccggaaatggtgttggtggcatgctcgctgccaacccaggtagagaggatgttcagaccgggagcgaagatgtcagtgcacttgccgtagttggagaagtaagcacgctcatcagccagagtggaggcgccaacagtgacggccttctcagcagcagcgggggagtagttgcaggcatcagcgttgtcgttaccggcagcaacggcaaagtgaataccagcgtcaacagcggcattgacagcgagatctagggtgcgagagctaccaccgccgagagacatgttggcaacactgcccttgaacttcttatcgcccttcttggacttcttgatgtgagcctcggccgcccattcaacacccttgacgacatcggacatagtacccgagccgttagagcgaagaaccttgacagcgtagacgttggccttcttggcgacaccgaacttcttgccggcgatagtaccagagcagtgagttccgtgaccgtttccatcctcatcggcatcaccctggggaatggtctggccccaggtagcacggccctcgaagtcaacgtgcttgatgttggtgccagtatcaataacgtaagcatcgacaccctcgccaccctcctcagcatacaagtacttgttgaagttgccgaaggagaggctctcacggtgagagatacgggcaagaccccagggggcgttcttctcaacagtaccctcggtcatggtacggacttcagagtccttctcgatgtaatcaacctgttttgagttatattagccgccgaactagggaacttccgcgagggaatgggattactcacatcaggatgacggcggatctgctcaatgacatcctcgtggaagtgaccagcatatcccatgagtgatccagcaacatggaaagtgtgcttcaggcccatgaaagcctccaagtcggcatcgaacacggagcgcttcttcagctccatccgaccggtatgagcggtgtgcacctcctgcaaccagctctggtgagcggacgcagtgctttggtcaacatgctccttgaacacaatgatgtaggaatccgggatatcctttgcggtcatggaggagaggataggagctgcctcattgtggatggagcctacttgcacgggcgaggcagctaccaacaacgggagcagtgtcaggctgaggaagcctttcatgatgggcaaagtgaaagattaaacacggcggaaggaacaggtgatggagaaacgatagttgtaggtggtaaaggatgagtgaaggataggttggatggagaggagaaggagaagatgaggagaagggcaggcttatctagggaggagacggaggatcgatgatgcaagcgggcattacatacgatacggttacgccggcggatgacctgtcgctgtcgatctagtggagaacatctgagaatggggtacccgatacggtatggtatggtcaccgtggtctcgggaacctcaggagcatccacttgacttgccatagcatctatatcagacttagcatcatatgaaggacgatttaagtgggttggatatcttccggccactataataagtaaatatacggtagctatagcaaggtagtgcagatggtcatcttccccccgggtacctggcagtatcatgctgctataggctataggcaacccccctcgcacggcccagtttctccaaggcaactcatcctccgaagtcgcgtgctttgtgttcggatgactcaaagggttgggcgaatcccccttgtcttgcatgaaagtgccattattggatacaacttggccaatctgcggagaagccatcacatcataggatcaccactcccaagcttctccacatagctcatagctgcgtcttatcgcgcttatcacgtcctatcggtgatcgcccgtaattttgaaaggttaccgtttttacaatacaataacagggctgtgtccagccccgtccagcccccgttccccaagggcaccgagtcacctgatatccaactctcccctcccccgatagcgaattacagcggtcgccgaatatctggcatggggttctgcggatgacgagtgcagcaaattttcctaaccgccaggcttcctattttggcacgagcactgtcacacaccaatgcagaccgttgtacccgatattgaacattcacggtctctgatggtcatacgccatcggagcggacgtggataagatttggctatggctccgtcggctcccctccaccctcccttcccttccgaatcaaccgatcgattggccgaagagctagccccaaccattgaacagctcaagagcgtcggtgcaggcaccgcgatcactctgcctcaggctctatcgacgaccgaatctcttctccgcctccgccacaccttcatagatgatgcacatccacgcaccgccaaagatgcattccgacacctccagggctttcaaacgctgctggcactggcggaccaggtagccgagctctacgatccggtacacaggtccaaggaggaacggaaaggcctgttggatatcttcaaagatgtcctcggggtattggcagagggcttgaaggaccattttggaaacaagcgatattttgctcggaagatagtagggggaggtattgctgctctggagcgaactctggctgtgctagtcaaaaagatagacacaactgagggtgacgcgcatcatctctacggcgccattttggccgcagctctatgccaggagacagtgtcgggtatttttgtaacactgagcaccaagtttccgcaggataaggactcaccttccccagaagacgtccaggatgctgtggatcattgcattggatcagccgagacagtggaagtcccggaactacttggaccgttccttcgtgtgtggttgatgcactcctctttgtcggctggatatgacatcttacgcctggccttacccgcatgtctttgccaattggcttcgcagtctcggaggaatgtcgtagccttgcatgccactgatatgctcacctcaatcctaccccttttattcgatggtagacggtcagacaaggagaaagcgatttaccaacatcttactcaatctctcagcgtcctgggaatgagtatggacgatgctggcttcttataccgcggagcgcatggcaacccacaagttctaaaagtgctattgtctgctcttaaatcctctaaggagcccccatcaatacagttcgatatgtctcgtcatggatactgttcagtcgagttcgcaacatttggtcggccatttcctcctatcaattcctccggctacactcttgcagcctgggcccgttttgacgagttcgatcccaacacgcatactactatctttggagcgtttgatgcaagccaggcatgttttattcttgcctacctcgaaaaggatactcggaactttattcttcaaacttcgattcgaggttcccgtcctagtgttcggttcaagtctgcaaaattcgagccgaatcgctggtaccatatttgtgttgttcaaaaaagaccgaaaccaatgtcttcttcccgcgcatctcttttcatagacggcgagtttgttgaacaactgaagatcgaatacccttccgttcctgtaagtcatcagtcaagcaagccatcgcgcgtgcaggcattctttggcacccctcaagatctagcaatgcgactcggaaaaggcgtgtccacttcccgatggtctcttgccaatggaatgcttttcgacgaggcttatagcgatgacatggtagctgttttctacaacctcgggccccggtattatgggaatttccaggattgcttgggctccttccagacatacaaggcctccgcaactctcaacctgcggaatgaacatcttcacccaggtaaagaggaagcctcggacattgtcactgccatccgtagacgagcaagtacattgattcgcgaaagctcgattttgatcaatgtctcttctgtcgccgttcttgatgacgacgatagcaataatgtcgacgaatcacagttgataaaatgtctctcacggcaggcagcaaagagtctgcatcagctaacaaagtcgggtggcaatgccgttgctctcaacggcgccactccggctatcaatgacggcttaacacagcctcagggggtaggtatcctgactggtgatcctgtcgttgcggtacctagggcgatggatgacgctagttggtgtctaggtggctgcgctgcggcccatctaagcttgatcaaggcggccagcaccgcggacggcacccgcatggccgtggaagctctctatgaagcagtgcgggacaactggagaaacagcgaggctatggaaagagagaatggctatggtattcttgcagtcttattgcgggagaagcttggattctgcatgggcaattctccgaccgcgtttaaaatccccgtggttacctctgatacccaggagctgtcatccttaatgcttgacctgttacgtttgactctcggattcgttggctacgatttcgaaacccccaatcactccatcatcacgaacccgctcgcctaccgtgttctactcgtggacatggacgtctggcgactcggagaatctcaggtgatggggttgtattactctcaattctgcacgtttgccgccgatagtaattatcgccgattcaacgccaggcgccttagtcgtatgcgtaagtttgcttcctcatgacaccacagttcttacctcaagctgaccaaactaggtgtcaacaaaaagttactggaaactttgaaggaaggggagctgaccgaagagtctctccaatcttgcttatcggcattccgctcgttgatggagagcagtccctctcccgaccttcttcgatcactagctctgtccatcacatatgcactccataagccaaagaccccaacaaaccttcagagaaagaagagccttcggtacgcggctacatcgtctcgacctgcgtcggcaacaccagagaacaattatcttcccagcgtgactgtgggcattgcaatgctacgggtgtactctgccgtgctgtgtaacccacatgaccctacggcattgaggaaatttgccaaggccgtcacaaacaaggtatgtggatgatcagttgccttggagagagttttgtttaatcatctgtgcagtggcttctttacctcatgtgcgaggaagagcctgaggttgtgatacttgcaacaaagattctggcccgcttggtcgtggccattggcagtgcatacagcaagaaattcgcggagaagagtggtggatacatcattctagaacaccgtctgaagagatgctgggatgttcccgcgttgtggcccatttgcttttctatctttttcggggttgatcatgctttgctggatctcgacaaatccctcaacgtatccgagctgcttagagctttcttggccgaaggcgatgtaacggtcgtctttccggatatgctacccgttattatgaatatgttgaagagcggggtgcgcaatttgactatggcaagtgatgcgcaagaagatactcaacgctctctggaagagcgtgcctctaaatgcgatgaactaaaaatgaacactctcaagcttccaggtaggctctcgttgctcatgactaaggtctggggttactccaactaacgccgttctctactgttagatgctactccctcagaccggaatatccatgggtttgctctcatcaattcggtggttcaatttttagaagaagcacgcgctagatcaccaagcttccaggatttcactgcacaatcgacttacgtgcaggagctactttctgtggtctatcccgttgttgtcggtgctgataccgtcagccccagcgaagaactaaatttccgacagaccggactcagcttcgatgacagcaatctagtactacgaccgcgctctagtactcataatgcattgaccgctttacagacaaccatggttgactccttgggcagtccagatgaaagcactggttctttgaaacgtggatcatcctttattttggtctcgcctgataaaaccaagtaccaggcctcttctgcacggatacggcggctgatgaacccaacctttgttggaactaaagctgccactgataatcccattgtcaaggcagtcttgaggcttgttctggccgtcttcgaggatcagcttttaggacgcaaagacttttcgggttttggtctctatctgaagaccccgcccggcttcctggaacaccaggcgtacttcaattcttgggttttttcctgtgtgctttcggcattgcaagatcttcctctggtccgacccggtctgcttcatgaaacccggacacttacgaacctcgggcgcttcgcgacacatttgacggaggcagtatacgaaggctggttcatcaacggcgcatcatccacacttgaatttattggtccaattttggagtatctccagcgcccggacgtatctcagttgaaaagcattcgtttatgtagccaggctaccgcaacgattcgctcgactctgtacagagttatcttatttcagttgtcagaggcagatgacaccgaaaccgtgacattgctaagccgattgaactactggcaggtggtccttctttcggcggctgaaacccaatcaaaacatctacacctgctatgctacctgctgtacaccaaactaatcagcacaaatggtgatgttcgctcagccgccactcgcttatggagaatcatattggtgcaggcaccggatggaataacaacactcctcagctatggctctatctccctccagcgtcggttggctgacggcttcgacgctctttctggaatggacgacgaagctttcttgctatggatcgatgaccagcgcgacgatctggatgccttgttcttcggtgtattttctcgatcgtgggacaccttcattcaagaagagaatacaagcactgaggagtctgttaggtcccgggtatcgaagcgtaaagacaaactcagacaatgggctcagatcgaaaaattcgatgaagacatgacgcgaaagcacgaagctactttgccacattggatctcgaatatcacggcatccgagttcttaaagtctcaacgattcttgcaagatcttcaggatagctctaatttcatgtggtcagctttcgccgatttactgcttgacttgcgacgaccgggcggccttctcgcggtagacaaggaaaggagatggtggctagaccagaccgaaggtcgcagccgtatgcgactacgcctggttccaaatgagtctggtgaacgacaggactatcagcctaagcgtaaagcctccgagcctccagcaatcaaaatcgacacccgaatacgtgcactctcggagggtgagactctgacggcacctcatcctctcacaggggaacaggagaatccggaaggcgagtcgccgaacgacgataccgacaaccggagcctcatggaggataatttcgagatgattgacgatcctaaaatcgagctcgaagactatgaagatagaaaccggaaggtgatgcgatctcttcaacgtggtgatcaggttcaaagcgtgtgcaacctgtctcgaatcattggtctagaagcagtggaaggtatctcaattctcggcaaggactgcatctatatcctcgacaatttcttccagagagcagatggcgagattgtgaacgtctggcaagcccccaatgaggaacgagatccttatgtgcgcatgatttctggtcgcgaatcaaatgaccaccgctcgcaggagcatcacacaaggagctggaaatggtctgatttggtcagcgtttccaagcgtcgcttcctcttccgcgatgttgctcttgagatattcttcaccgatggcactagctacttgttgacattgctttcggcacgagctcgagacgatctgtgcaaccaactggctatcaaggcgccacaggtcacgggaagcaccggacactcgcgaccggaagacgtctggcgatttgaaactcttcgcagtcaagatgatgcaccacagaccctcgggtctaaatttgctagtgtcttcggtcaccttccggcaaacccagcaacacgaaaatgggtcaagggtgaaatttccaacttccattatctgatgttgatcaacacctttgctgggcgtacgttcaacgacttgactcaataccccgttttcccgtgggttttggcagattatacaagcgaagaacttgatcttaccaacccggccaccttccgagatttatccaagcctatgggttgccaaacactagaccgagaaatgggcttccgtgagcgatacaatgcgtttgctgaaatgggcgacgatgactctccgcctttccattatggaacacattactcttctgctatgattgtcagctcctacctcattcggctgcaaccatttgtcaagtcatatcttttactccagggcggctccttcgatcatgccgatcgcctgttctattcaattcgcaaggcatgggagtcagcatcgcgagggaacatgaccgacgttcgagaacttacccctgaattcttctatctcccggaattcctggtgaactccaatcattatgactttggtcttctccaaaacatgaccacggccattgactcggttgagctgccaccttgggcaaagggcgatcccaagatcttcatcgctaagcaccgggaggcacttgagagtccctatgtttccgagaacctccatcactggattgatcttgttttcggcagcaaacaaaagggtgaggcagctgtcgagtctgtcaacgtcttccaccacctctcatacaaaggtgctaaagacttggatgccattgatgacccaatggaacggttagccaccatcggcattattcacaacttcgggcaaactcctcaccaaatcttccaccgacctcacgcccagagggaagatcaacggcaccgcataccgcggctggacactcttgcagaatccctgacacagatgcctttgtctcttctcgatattgaagaacgagtaaccaccctatccatgaaacaagaccgtttgttgtgtaccgcgcccctgaggctcaacgtgccgccggcctatgactactacatggaatggggtttcttcgatggtagtgttcgtttctacgctgccgatactcgcaagctcctgggtcactttgagcaccttcatgttggtcaattgtctcatgctagctttgcggattcccgcaccttagtcacctgcggtacggactgtaccatctcattatggacggtcactacaaactccaaatctgttgatttgcagcccattgggtcgctatttggccatcgggcccccgtaactgttctcgccgtttcacgctccttcagtgctttgttgtctgcctccaatgatgggcaagttatgctatgggatctcaatcgacgatccttcgtccgagcccttcccggcgacggtgcggtcgatgtatgttttcttcttcctaccacctgctgtcctttactgacaaattagtgtgctcgaatcaacgatgtctctggagacattatggtttgtcgcggtaatcgcttgacattatatacccttaacggcatattgttggttgaccaaccagtctgcgagtcgggcgacgaccacgtcttgtcctgcatcttctacgagggggtgcagaatgaatggctggaacgtgaattggtattaacaggccatacccatggtgtagtcaacatttggagcaagaccattcgcggtggccactttgagttggagctgatccgacagctgcatcataccgacagctgccgcgataatggtgccaatatcaacgccggcatcagttgtattttggctctcccccacgtggtctatacgggggatgaagccggccgagtggtgagttatatttttccggttcatgttcattaacgaagctaacatgatggtagtatgaatggaactgcattcagcgccgctgattttcttggttatcgtcttcccaggggattgggtctgttgtactttgcacaattttacacaatacacaattatttctcccattcattaacttcaaaccttcataattcgacatccgtactatcaatctaccaatttcctcggctagtatcttcagccattaaactagggaagggtgtcattcggacggaataataaatacaagggagagaaagaaaggagaaactatctataaagatctcgacaagccatgcaaatcatgaatgagaatgtctacggacacactcttttactaattttatctaagggtagaaagttactactttggagtcttttctatagaaaaactaactctagcccatgtaatatagtagatatattaaataccctctatactagtagaccggccggagtatcttagtcgaatcgacactagttgttttcctctttgcagatacaacgtagttcgatcgccattagaattataaaaaaaaaccccgacacttgctcagctgacggccgcccaacaacctagccacaattccattccagtctatggaccattcgagtgagccgttttcgactacatacagtactagtgggtttgtactttctactttccgataggtaacatgctgcgcagccctcctgggaggattacagtgcatatggagagctgtaccgagcctagatcgtcgttatgcagcttcagtccgcgtacgcccagtccctaccggtgacccgttaaactaatgagtagctgtttatcagttcagttagctacggcatctccagtggccctagcacccgccagcctttggagagggatttattaactgcatactacaaaaataacctttatcgtcagcacaccactttaatatcttcagcccaggaatcctcagccactaccagagtttaagcgccgtgctgtaggattcccttctgggaacgccacggcaaaggctcgtactatcggacccggccattccgttttgggtttatatgataatgctgacatcaagttccatcgctcttctggagctgaatctgatagtagcatttttggagagggcatatcctgtcgcttcgtactatcgggtatatactaaccatttacgccaccctcgcagcctcggggttctcctatccccgtatatgcgtcgacgccattatttcatttcagctccgagtgatctatttcctgcaggtgagattggcatatggctcggtcatatccgaacccacttctctttggttcatcgtgagattaatgtaggtgtaagcactagagcacagcgcccaaaccgctgaagcactaatgtcgattggattctcggtggcgatctgagtagcaaatagaattatacctcaataatagccgagagaaggtatctctattagccttcgtatcacggtcccgtttgttgtataaagcgtccatatcccacgagtattggagcttgtctcctccgcttgactcgacaagacactatttctctattagagcatttactctgcagcaagcagcactcatacacaatcccaggtccagatatactagtcacaccagcatcctgtatgtatgctaccacaagctcttcaggagcatgctgacccttgtagcgctacaatgtcctacactatccgtctccgtgtcgagaatagcacctcggacgctctcacagttgtcgaaaaaacctgctggtactatgccaatggatgtacctggaccgagaacgacggccagcatgtgctgttcatgggaggtagcggtacctctggaatgcttcgcttcaaatcctccttcggcgaaatatttactatcgtcgtgggcatccacaattacaaactatggtgtggtttgctgtgggacctgggggaccaggatacggcactgaagctgcatccggaattctacagagggggcaagtattcgcacgcgacgcctgacgcgtgttacagccccgtgacgcatgctacaagggcgtcgattacttttgagagggagaatcaaaacgaggtatttgctgttttgaaatactatccatcctaggtagtccaggacaggcgtgtttgctagtttgccgtgggatagggcggcagatatgtcaggtactgattggtcgactctgggtctagataggaagccttacttccgcactctattctcatctgtgtcactcatctgtgtcaagaatgtatcaagagtgaataagataaagaagatactttaaacggtccgttaagtctgaaaggactactagcacaatacactagactcctgacatttctagacctatcatcacccctgatgcggccgaaacggacactacagagataaatattatttgtgacttattatgaactgaagaagtgctattttggataccatgaagcagtccgactcgtctcgcttttttgctcatccagagtatcatcaatgctcacctgagtattgctcacatgagactcagaatagcactctccaagaacaacttcatacatgcgaatcagaggaatgtgagatcttacgactccccatggaagacttcgacaggatggtaattgagagcgcatccacacccactccacctgaaggtgcattcgtgtggccaaccgatatgacgaagccaatcactcccttctttgcacctaaatctacatacgttgctatatcccacgtgtggtcagatggcacgggtgtgggcttgcgagagcctggaagggtcaaggaatgcctctatcggggatttgcgatcgtcgcggcagggtatggctacaaaggattctggtgggatacaatctgcgtcccaagagatcgtagggcaaaagatgtcatgctcaagaatatgcatctgaactacaaatacgcagcatttacacttgttcatgaatatctgtgtcagttcccatggaggcaagatggcacccctgctatcggtcttgttctatcgccatggttcacacatggctggactgctttggagctagccatgtccaacaaggtttgagtgccttatcgactatctccagagaggcctctagaagaggtcattgtcgatcttgaggataacattatcacggaagacatcgcaactctcggccatcgagtagcaatcagacttattcggcgtctcaaattgcccggtcgttctctcttggatgttttgaaaatcatgagctgcaggacaacctcatgagcacaagaccgaattatgattatagctctcatggcacaagccatggaccttgaatacagtgactctatgatcgagatgaccaaaaatacattgcgttcatgcaatgaaatacccaagacattcattttccatggtcatactacactccactcgcgcggttccttcttatggtgcccatataacctgttcgacagaaacttggctgtgactttagcttgggataagagacataaggagatgttcatttggagaatacgaaacgttgaaatgatgacggaaggatggagcaagtctgataaaggttgattttggaaccggcatatcgaaaatgataactttattgtcttgaatgatggtacggcttttgggtattgggggtttcaattgatctcaattgagttacccttgaagctgaagccgtacagttcccatgtatctagggaattccaaattcgggctgcttagagccatccatcgaggctcatgcttcttcgtcaaactttttcagacctcgcaatacttgtgcaaccaatcaacacgagcatactgtcagaaagaggactcgaccacctattcgtcggtgaaatgtaaattggttgtcactaccttggctgcgtagctgtggatttcaatgagttcgaaagcactgataccgattattttaggatcggcttggatggaaaagagtgttcatccaggaggtggtggacgagtacaggaagtttagtagacttattgaagggcactttggtgagaagaagacacaagaagtccagacccttagggctagtgtaagaatcggaaccgaggatttagcacttgatacgcgccgagtacctctgagatgatattacctaggtcgttctgggtaatggacattacctataccagaagttgcccttttggggaattacatggcacttgactgtgactcccgcggcgtgagattctgtaaggatcgcatggtttctgattggactacagtgtagtggtgcgatgaaagagggagagagttgtcaattcctaaaggggcagaatgcccaactatctagttataggggttagtgcctgctgcactgggctgatggccaggtaaccactacatccaacaacatgatatgtgtttagactttagactccagtgtatggggcgaaacgcacgactagtactgaggggtcggtgtctgaggcattcgtccggtgatcacctgacccccatgtataacaatatgccattcaactcccgagccctccgaaagatctcacgatagattcccaggtagcacggtcttggtcaagctcatcgggcaacatgtctccgacatctccggcattgcgggggatatccggggggcgggcaccatcgaagattgctgctgtggcagagcttattccgcaacgcttataccttgattgccgaccttgccatagactcgtcgattcgaatctcctccctgttgatgagtagatcaatgcttgagcagacaacatgagggcttggcagaagaaaggcctgcaccagtaggtagtatggctttgagcactgtcatctccgcggctttctctattgctcctttctcttccctctcttcgctgctgcttctccatacttcttttcgattctcagggtggatacttcactggtgtagaacctttcgagtaaacgggtatcatgcccggaacttacttctggtagaaggatgccttgtcataccagtgaatcgggtagctcccaggagaggataaattctcgatctggtattcttcggcatacgcatggcgtaatttttgtagaaatggatacgatatagggagatcgcacaaacgtgttcgaagctcgatttctgtcacagagtttgaagtacgtgatacccacatccgaatatcatggtgtaaggctgcctctgcaaattttctcatattactcggtcgaatgttttccttttccatgcgatcaaccagaggattattgtaaagatctgcaaagacactcggacatttctttgccgcctgttgtatcatagctgtcgtcggcgcgtcttcggcagcaaatgctccttcgaggtaaatccccagagtccttcgggaagattcttcaaggagaagagttcgttcgatctcacgaccgttgcatcgtgtaactctatcctgaaatatgctagataaagacacaatcactccgttagtaggtattccatgacaggatttgaacatttacctatgctctaacattgaggtcttggaggtcatggggacgctctggaccgaagctttggtagggccacccggtagtggtgaagctgtgacgatctcgagcacaagcgagaacagtcatttgcataaaatcagggaacggaacttgcagctagttttttttcctttcctctcccgtacttagtattctgacgaaaaatgcacttattcatctgagaatttggcaagtagcagaagccactaccgggggcgaccgcagcagcagcgtaatgctcagtggcatcagcagcctgattgatgcacacgttagaaataatattcagtcctgcctagtcgtgtagtcccgagagaagactgctccttgtagagtggaaacagcaggcaatttcttaccttgatggcattttgggccgcggcccggaggttcccaacctcttcatgggagagaggggatcccttcgccttggattcggtggcttattcagtatgttagtaatgctcagtcaactatagggcttattgatcgttctcttaccctgtgggccagccgcttcttctccttgactgagatagcaagagaaacaagaaacaagggcaaagtgggagagggcttgcttatatagctggccgattccatatgtcagtaatgctcagtcaactatagggcttattgatcgttctcttacccggtgagccagctacttcttctccttgactgagatagtaagagatagtaagagagagagaaagaagaagcaagtggaaagtaagagacggcctgcttatatagctggccgctctaatgacaaacaagacgaacagcaaacatcgcgatccgtacaatgggatcaatgactagatcatgatatagaccataaattttgaacagacatagtgagtagaagctctgttcttgcctaaccactctctctcgaaggacagtttgtagcttcttctctagggacaactgccaatagtcgatcggctaatacacggtcttcttctgtgtcctttatactacagacttgttgttgagggtgactcgctatcctatgaatattgggtgagcacaagttgcacttggctgggacgcataaccctactttgatcataaacacacaagtaaaactagtggccactggcggtcgagtatggactacagcaccgcaccaggactggaaggctattcgattgatccaatgacatggaagacatggaagacaatgtagaaaaccctcttgaacaagacatactatactccgtaggcctagggaaaatgatacatacatgttactactccgtataggtacttccaattgaaagtttcaagcaacttccattcggaaatccgtagggtccatagttaagctgttcggaaatcatatttctccataactaccccgtagccgtcgacatgtatttaaccgggcccccggtgaacgttgcaaagaccgctacagtagtgggccgttgtccggtctaccatcctccggttgggggaagacggagcactctgcgccggatttgggattgtagtacacctattcaagccgttcaagcagaggaaatattgaaaacaaatcgaagagtattaatagaaatacggcagctattttagaacgaagaatcaagaatccaaggggaaatggcaaataaaacaagaaaagaagtcggatgttgtcgaggggagctgtctgatttcatcgtgcagcgtcatttgccccgcctgaaaatggggcagaggcaaggtacttgtgttgactatggcgtccccatactaagcgcaagtacccggcaattgatctgggactggtcaatgacaccacccctccttcttaaacaccgcgccgtccgccactcttcttctctcttcatactttcttcatttcactttcaaaacatcaaaaaatgtcttcttctcttgaacagctcaaggctactggcaccgttgtcgtttgcgactctggtaagctctcaatctgattatttgggttgtattgaaaacacgctaacactaaatatttaggtgacttcgccagtatgtattccagactttgcttgatgatatgggttccagcattggacagctagctaacttcaaccacagctattggcaagtacaagccccaggatgccaccaccaacccctctttgattctggctgcttccaagaagcccgagtatgccactctcatcgacactgccgttgcctatggcaagaagaacggaaagaccctcgatgagcaggttgaggccaccctcgaccgtctcctcgtgcaattcggaaaggagatccttcagatcattcccggcaaggtctccaccgaggtcgacgccaagctgtccttcgatacccaggcttccgtcaacaaggctcttgagatcatcaaggtacgtgcacgagtttatgcgaaatgacttccggcaattccgagctgacccttgctactcagctgtacgccgacaacggtatctccaaggaccgcgtcctgatcaagattgcctccacctacgagggcatcaaggccgctcacatcctccagtcccagcacggcatcaactgcaacctgaccctcatgttctctctggttcaggccattgccggtgccgaggccggtgcctacctcatctctcccttcgttggtcgcattcttgactggttcaaggctgcccacaagcgcgactacaccccccaggaggaccccggtgtcaagtccgtccaggacatctacaactactacaagaagttcggctacaagaccattgtcatgggtgcctctttccgtaacaccggcgagatcaccgagctggctggttgtgactacctgaccatctcccccaacctcctggagagcctgtacaactccaccgaagccgtgccccagaagctcaacgccgccgatgcctccaaccttgatatcaagaagcgcgagtacctcaacaacgaggctcagttccgcttcgacttcaacgaggaggccatggctgttgagaagctccgtgagggtatctccaagttcgctgctgatgcggttaccctcaaggagctccttgcccagaagattcaggcttagatcttcttttaattgtttaatttcttgtaaattggcgatctcccaaaaaattggaatcggtagatacgaattgatgaatttggcctcagtgctattttgatatataattctccggtgtcggtgtagcagatcagacttgaggggtaaagggaaccgcggaatctggccgggccggcttattcaggcccccgcactagtttagccttctactgctttccagctatggtgtcatttcacccggagcagagttatcctggcatcttatattacccgaggttgtgacaatgctattaggatgggttggagctgtagctgtgagacaagtgtacaatggtattgcagactgcataacacttctagcatgcagctattggggtatgtggcagcaattatttacacagcagtatgcacattattaataattatgtcataattattccccctcgttccgacttgctacccacttgggaaggtgggggatgttttgctgtggtattaagtaccgagtacacgtatacagagctctgtttatactgcgatacatgtacccagtacttgatccatacaagtgtagagtcacgtcgacatcattcgccttattatctccctccgcccacttcctctcctcttcttcacaatcctcattctcaatcttcaatcttcaatttaaaacattttaagataatcaaaatggtcaaggctggtaagtaatgtccattattggttctctctgggccatacataagctctcctcagtctccaagttccccacgatcggtggcaaggaccttgggtgtgagcagatttgagcaccttgtgatccagagcgcaaatccgggcctatcggcttgcgtcctcgctctagctctccactgctgtctgggtatctgccaatacctctgggacaatccggggatcatcgctgctcatttgctagaagcatggcatcctgatcctgggtgcggcacgagccgttgctgaggctgggaccagacaggggctctggagatctagtagccggcatgccggacagccttcgataagcattctggaacaattcattgacctctttcctttccgtgcagttgctgttctccgtggtgacgctaaggtcgccggcaccgtcaccttcgagcaggctagcgagagtgcccctaccaccatctcctggaacatcaccggccacgatgccaacgctgagcgtgctttccacgttcaccagttcggtgacaacaccaacggctgcacctccgctggcccccactgtatgtcattgatcagccaggtatgaggaggaaggatgggatgctgatcgcttctagtcaaccccttcggcaagaaccacggtgctcccactgacaccgacgtgacggtcggtgaccttggcaacttcaagactgacgctgagggtaatgccaacggctccaagcaggacagcctcgtcaagctgattggtgccgagtccgttctgggcgtaagtttataattaatctagtattgtcgaggcagattgctaacattgtttagcgcactctcgtcgtccacgccggtaccgatgacctcggcaagggtggtaacgaggagtccaagaagactggtaacgccggtccccgccctgcttgcggtaagttcatgaaggcgtgctgaggtggagatgaatgctaataatctcttctaggtgtcattggtattgccgcataaatgcagctctattcccttttgaaccctggattttgatatccccgtaattggtggatggaaaatgcaggatactccgtctaggatacatgaatgaatgccaatttgacatgtgaatatttggatttggatatctgtcatgatcgatgaccactgtatagcttcgatgctttgtagacttccgtagaagctcggacggctgaccgctttccccacaagtctaaacaccggccacgtttcccctcaggccattctgtttgctctcaacttccttttctcttgtgttttcttttatacttttattctggttctgtcttcaatctcatcacaattgtgcatgtggtagtggagactgtttcattcagtatgcctttcgaagcccgggtcaagtctgtcctgtccggtgacacggtcgtgctgtcgcatatcaccaacccttcacaagaacgtgtcctgagtttggcttatgtctctgctccaagattaaggagagagggtgatgaggtaggtgcattgttgagattgattgcctgttgattgcaccattggaagaccaaattgctgcttgtgtgatctccaaattggctttctggtcacaagagctccatttagcattgaacaaatggccctacctaaaaagcgaagagatcgaaagagataaggctaatccaaagaatcaattatagccatacgccttccaatcacgcgaattcctccgcgagctccttgtcggcaaggtcatccagttccacgttgtgtacaccatcccctctggtgccaagcgcgactacggtaccatcaagctgcccggtttcgatgcctcattgcccgatatcagtgtgcaggagggctggacccgagtccgcgaagaagcaggcaagcgtggagatgaatctgaggagaccattggactcctggaccgtctgcgggcattgcaatccctcgcccaggaggaaggaaagggaacttgggctggcggtgacgacgggcacatcgacactagctacgaattgattggtgctcgggatttggttaaacgtaacttgggtcaccagctggaaggtatcattgagaaggtcctgaacggtgaccgtgttgtgctgcgtttgctgctcaagccgcaggagcacattcagactgtcattgccgttgctggtatccgggcaccatccgctaagcgcacaactgctgatggcaaggagaccgcggctgagccgtttggtgatgaggcactgcagtttgttgaggaacgattgttgcagcgcaaggtcaaggtttctttgcttggtgttacgccgcagggacagattgttgccaccctccttcaccccaatggaaacatctctcgattccttcttgaggctggtctagcccgctgccaggatcaccactccacacttttaggttcggacatggctcttctccgccaggcggagcttacagcaaaggccgatcgcaagggattgtgggttagccacaccggacccaccactgctggtgccgcggctgtggactatgttgtcacccgtgttttgaatgctgataccctctttatccgcaacaaggctggacaggagaagaagatcagtctcgctagtatccgtcagccaaaaccctccgaccctaagcagtctccctttgctgctgaggcgaaggagttcctgcgcaagcgagtgattgccaagcatgtcctggtcaccgtcaacggcaagaagcctgcaaacgaaggctacgaggagcgcgaggttgctactgttgttcacggtaacaccaacgttggtttggctcttgtagaggcaggttacgcctctgtcattcgccaccgcatggacgacgctgaccggtctcccgactacgatgcgctgctcgctgctgaggctgatgcccagaaggagggccgtggaatgtggacttccaagcctcccaaggcgaaacaggtggtggactattcagagagcgtgcaaaaggccaagctggagcttggtatcttgcagcgccaaaagcgtgtccctgctgtcgtcgactttgtgaagtctggatctcgcttcactgttctggttccccgtgataacgccaaattgactctcgtcctgtccggcatccgtgcccctcgctcttcccgcgggcccagcgacgccggtgagcctttcggccaggaggctcacgaccttgccaaccgccgctgcatgcagcgcgacgttgagattgacgttgagaccattgacaaggttggcggattcatcggcagcctgtatatcaacaaggagaacttcaccaccgttctgttggaggagggtttcgccaccgtccatgcatactcggctgagcagtctggtcacgccgccgagtacttcgctgctgagcagcgggctaaggacgcccgcaaaggtttgtggcacgactgggaccccgccaaggaggccgctgaggctgaggaagccgaggctgccaatggcgcgggaactggcgctgaaagcgatgccgcccccgcacagcgtcgcaaggactaccgcgacgttatggttacctacatcgaccctacctccgccaagctcaagctgcaacagatcggcaccggtaccaacgcgctcaccgagctgatgagcgctttccgcaagttccacatcaacaaggccaacgacaccccgctgcccggccctcccaaggctggcgactgggttgccgcccaattcaccgaagacggcgcctggtaccgcgccaaggtgcgccgaaacgaccgcgagaaggagcaggccgaggtagtctacatcgactttggcaactccgagattctgccatgggcatcacttcgccctcttacccaaccccaattctcctcccagaccctccgcccccaggccattgatgcagtcctctctcttcttcagttccccacctccgaggattacctcgaggatgctgtcggcttcgtcggcgaccagaccttcgaccgtcagcttgtcgcgaatgttgaccacgttgaccaggacggcaccctgcacgtcactctcctcgacccctccgcttccaagaacctggataacagcatcaacgccgacatcattcaagagggtctggccatggtaccccgcaagctgaaggcgtgggagcgtgcctccgtcgataccctctccaacctgcgcgcgctcgaggacgaggccaaggccgagcgtcgcggtatctgggagtatggtgatctgaccgaggactgacttcttgtatctatttgaattttgagctgcacgagggtgacctgtacagatattggttgggatggccctatgattagcatctggctgtgccatatacactgagatatggtgcttatttttaatttaggccggaaatttattgcattttgtgtttttatatcgcctgtttcgtctgttactaccttggttgatccggccaattagctttgttgatcgatggatcggcgatgtacttcggcaggtgttgggcaaaaagatactcaacgatgttcaacgatgttcaacattctcaagaagacctaaatcccacctgtgaatctgatagagagcaaagatgtatcacaaatagagtcaacccccagaaaacaccgacgctcgggtcaaaacaccgtcacatttatttcaccgcctccttccctccgccacctccgacgtctgttttggaaagggcgatctctcctgcaaaaaagtaaacaaacttgagagatcagagctcaccatgttttggggcaacaaaactccgcaggactccggagaggacctggcccgcaccgattcagctacgaagaacgatcccgccgcatccgcctcacaagcttccggcaccgcctggctcgccgggcacttgcaccaccttacaccggagcaggaggaaaagctggaagagttcaagaaagtgtgcgctgagcggaaatattacacccctgccgtgaaacaagcagatggcgtcgaggcgaagccggccagccaggacgatgcgactttattgtatgtgaatgtggcgcgtccaccttaaaccccaatccagctagaaatgaacaaaatcaaaccgaacgattgagtgctgactttgattatttgcgcaggcgattcctccgagctcgcaagttcgacgttgagggcgcgtgggcccaattcaaggacaccgaagactggcgcaaagacaacgccatcgaggagctgtatgcgaatatcaagattgactcatatgaagccgctcggcggatggtgcgtgttataataccctgtgaaatgaataccccgacctcgtgctgacatctactgtctctgtagtatccccaatggactggccgtcgcgatcgccgcggaatccccgtctacgtcttccagatccgccacctggatcacaaggctgtcgccgcttacaactccaccatgaatagcggtacacccgagacgcacaaatcatccaaagttcctgcgcgcttgttgaatctcttcgcgttgtatgagaaccttctgcgcttcgtgatgccgctctcctcggcgctgccacgtccgaacccggagacgcctatcgtgacgtcgaccaatatcgtggatgtcggcggtgtcgggctgaagcagttctggaacttgaagggtcacatgcaggatgctagtgttttggccacggcgcattacccggagacattagatcggatctttgtatgttgcgcccccgtttaatacgtccagggagttgaagataagttcgtgaaactaactcgctgtcagatcatcggagcacccgcattctttccaaccgtctggggctggatcaagcgctggtttgacccaggaaccacctcgaagatcttcattctctccgcctcagaggtcacgcccactctcaactccttcatggagccaaccagcatccccaagcaattcggtggcgagctggactgggcgtggggcgatatgcccaacctggacgagcccaccagcgagctgctccgcggcatcgagcaaccgctcgccgagggccaaaagcggagagaaatcatcaagggacctgttctgttcaacggcgatcacctccaggtcctaggcactatggatggaacgcagacgaagcggagagaaatcgttcccatcccgaaactccaggcttcggttgagtcagaggctaactccgatagctctgcagagaaggcggcgcctaatggcgcagagactaaggtagacgatagcgagaaaaccatcgacaacgtggcggtcaaaatcgaccagttatccgtcgatgagaatcatgtttccgtatagagcacagagcacatagaaaggtagcgggaataccgtgttgggatttgtgttggacatacaattagcgatgtgacatagcacaagatagcgcagatctcaataccgaggcatatttttttcttctctctgttttgttcttggatatatgtcggtttatatattatcatgaagtgggaactgcatgtgcatatgcatctatggcatgatgtgggtggcatgttggggtatgttctggtttcatcttcccaaaatttatatactctctccccgtatggagtagcttgctctggtttgttctccatctggattgactcgtatttacactgttcatgagccttgattatgcttgacatctggtcgtctataaaatgtactcctttgagtaccgaacagatgtgcatcaccatatttatatattttgagtgcgtccagtatatactgtagctaagtctctatgaagatttactaagagagtataactcatccttgagcatcggataatgaatcatacagaaatccccgaaatatatgcaagtcgaccaattagaatgagggctttggttgagcacatgactcgagcccatgtagatgcagacgcagggcaacgtctccacatcccatctatccggctgagtacgtcgaacatctagaaacgggtcgtgattaaccaaggaaacataatttactcatgaatgtccttgtatcatgatcacccctcaacacgaggtaaccatgtcaggcccaagcggtagctcgctaacgcggtaaacggccatgttgttgggaaagagatccaagatgagatatgatcgacgccacgctctaacccagtcaaatgcccgaggctcattttgcggggagcgtgaaagagtgggcattcttcttcacatgcgccgagcgtcgccaatggccgaacgactgggggagggatcgacaataagcccaagcacataaacccactaagccccgtacctggggtagatcgaagcgtgcactccgacacccttatacagatcacgaatcagccatgaatcgtaacgcaaaagactccatgaagtccacctggcggcagcaagcccgctcagagtggacactcttccactggttctacgaagtcctcggcatccaccccgaacacctcgacaagaacgtgcccgtccatctaaaggaagatgccgtgccgtacatcccagactggtccatgcaccgctgggtgctcacgcacgccgccatccccctcctgatccaccacgcgtacgtcgagatcaccggccacaacctcagcgcctggggcgccttcttcctctacggcctcgccttcaaagccatcgccatccacgaaatccacgtcctacgacgagtaggccaccagcacggcttcctagacggcgacaagcacgcgcgcgacggcgtcccagacgtcggcgtcgccaaggtcgtcttctcactcatgttaacatcaaccctccgcccaatgttcaccgtcttcatcgcctaccacgccacacacccgccctccacgatcagcttcctctggctgcccctcgaagccgggctgtacggtatcgtcctcgacttctggttctactggtaccaccgactgatgcatgacgtgggcgcgttgtggaaataccaccgcacgcaccacctcaccaagcatccgaacccgctgctgacgctgtacgcggactcggagcaggagttctttgatatcctcggcatcccgcttatgacgtatttcagcatgcgggctgtgggcatgccgatggggttctatgagtggtgggtttgccatcagtatgtggtattcgcggagttggcggggcatagtggactgcgggttcatgctacgccgccgtcgacgttgagttgggctttgcggtggtttggggcggagcttgttattgaggatcatgatttgcatcatcggaagggttggaggaagagtcataactatgggaagcagacgaggctttgggatcgggtctttgggacttgtactgatcgtgttgaatcggttgagaacaatgttgattatgtcaattcgtcgcctatgccgttgtattgagtgaggttggcttgttgatagttttgcttctggtgtggaaatcagtacttataaagcctgtgcagtgttgcagagggttgttgacatggttgctattgttttcttttgctcactagttacactgtttgatgcgacgttggatcctttggatatcatgtctatgaatgaaatgttccccatgaccaatgactttctgtataccacaccgcatattattctgagcaggcatattcttctgagcaggctagtttggctcgagtacgtggcgagcaaatatggtatttaagatgttactatatgcagagaattgaagcaatgtatttattacagtttaaagcacatatggcatctggtatatgagcctatcaggcctaagccctccacagggcattaacttgcttctttcgagtctagacaaaaataattagcaaatgtaccgggagcagttagacaaaagacttaccatcggagccaaaacggcgacacccgctccgagtgccaccacagtgagaacgagttgcagcttggagaagctcttgccaaggatatcaaatgcctggctgggcgtagctcgggtaccgaaaatatcgcttccgtaagcgaagatgagactggtactttccaacagggtagggcgagagagcacagcattgatgccggcgacatcgcgcgtgtgcgagaggtaccatttgccatcgaagtcgaggtagggggcgtagcggaataggccttcttcggcttcggccgcggtagggtcacggtcgacagggcggcgagggtcgaggacggggcgaggaatgccgacgatggagttggaggaggggagagtgcaaagaagctggcgggtggtgattccctggcgcgtttgagtgacggccatgtgggagattgattcggggatcatgaaggcctgggagatgacgtagggcaacgggaggatggcggtgctagagtagtttgtggcagagtcaaggagaccacggtcgttgggcaagggggattcgtagagctccgagatgaccagctggtagcccttggcggaggactcgcttccatcaacgtcgccccagaacgagtaggcgaaccagttctcggacatcgcggaagcaatgggttgggtagagtccacgcctgcttgggtggatgcgtggatgacattgcctgagactccgtctaacaggtagaaactggcagtgtgggtctgctcgttcactgcagtcaccagggcgaggttggggttgaggtacttgtaaaggaccgagcggtttccaaggaccctgccgatggacgccacagggtcatgcgcaggacgagcggtcgcttcgacgaccttctgtccggagggaggaacaaactcccacacaggagtcttgttatccttcgcagcccagccgaggactcggccatcaatgctagtggttaccaagaatccatcttcgttggcaaatgcagcgactggtgtaccatcttcacggacaccgacggtggccagcgagcttccatcctggatctcgaagacagcaattgagtggagtttgctggtagatggttcgatgcgggaaacgatctcccctgtcgacacatccacagtcacagagcctccgtcgtcggagtagatagtcacgactcctggcgaagtcaacatagccttcacattccagtccgatgtctccactgcctgaatgccccaggaaacggcgccgtggtttccagtatccaaggcgtatacacggccgctcttggtggcgacaataactgatttggcaagtccaaagctgtccaggttggacacttcgtcggtcaagatactgctcagaatgcgcttcggcagatccttcagccagtcgggtagatgttccaagtcccggacatgacgcttgacccggtgcaggtacgcgccgtacaaagtctcgtgaccctcgacctccaattcatgggctagatcttcttgggcgtcagtttccgcccatgtagctgcaacagtatcaatgagaccctcatgccgagtccactcgatctggccatttcggataagttgccagtctccatacttccggaaaagtgctgtcctaacagccacggactttcctttggcgacaacctcggataccgagtgaagggcaatatcagatgaaggcttttgtagatcccatcgtcccagaatcccatgagaggcggatgatacaacaacggcctccaagtcggtgactcgagtgaaataaacattagcatcaatgacactgactgcaactgctgactggccggagagatagggtagccggtaagccttggtgaccttagcagacaccaagtccacatggtaaacctcagcccaggctccggcctcagtttcaaagtggaccaagaaatggggcagggcattaagcttgtggggagcgtggaccgtgatttgtcgaattccggagccggaggtattgtcaatggcgatagaagtgacctccttagtaccaataacattgaccttcagggacttttgcgatttgtcggcccagacgatgataggcgaggcggaattagcgcccacatagaggacggactccggggtagccacatcagcctcagagttcagaatttgatgacgagtctgtcgcccagtcaatggatccaaaacagtgactttgatcttgaaccccttcaacatagccgagtggagagaaatatagaagacctcggtggaagaagacgagacttggaacgggatgtcgccgctagaagaacaattgattagcttgggacaggttaaaaaaaaaaagcaaagacgagaccaaccttgcatccttgtattcccaaacagtctttccagtattaccatccagccgtttcacaatgccgttgccctcgctagcaaccacagcaatcgtatctctaaccccggaggtcgcggtggcatcctcaagctccaacagctcgagatcgccaaccacaccctcggagacccgatgttcccatcccagcttgccatcctgggcactccaagacgcgatgtagttatccaccgcagctacaacggcatcgttgccatcgagtccgcgcaaaagacccgccccatgtgcgggagagtctgccgaccgcgatatgttctggcgccataccagtgcgccgtcacgggggttcacggcacccacaagcaacttgtcggatatggtatatataagggaggcatttgaagacgtgaatggcttgaggaagaaggtcgagtcgggagatggagtaccgagaagagcgtggtggaagtcgatgtggtcgacctcgtcagagtagatggccgccgcgggagataggcacgcagcgaaaaagagcgccgcctggagccacattttgacgagtgactcttattgaagcattgaagaggggaggtgggaggtgatgtagaatggatgttgtcaatacaagcttggcgtccgggcggtgataacccagatcttctgtctacaaccatgaacgtccaacctcgctccctcattgcctaatgtcatggcaatagaataaccacgacatctaaaaatacaataaaaaagacactacaaggccgcataagcgaccaactattcttcatcatcaagatggccccatgccgcagtgcgaataccgtaagtcaagtatctgatagaaacaatgccccagagatctttcgttgtagttgagtatgttttttcgaacaattcaaagcttcgtagacgtaagaatgaaaagaagatatctagattccatacaacaagctaaagacgtagccaaaaacatctagatcttggtctatcagactcgagtccctcacatctagctccactacaccagtcaattcatactaaagccagagccctccagctaggaatacggtttggcagttcctatttccagactatgagtttgtaatgctaacattactattagaatgacatgcacaagaagctgagcagactagacttacatcgaaatccaccgaaagggctagtatctcatcgtccgttgaaatttgcatgtactcgaactcgcactcgagctcctcagagttattagtgggcctgccaaaccaattgttcatcggattgaaaagtggacgtattgcgcgaaaagctccgattccaattatcacctcaaatcccctaagcggccttccttcaaaaccaatcatcgtttgatttcctggagcgcgatagccaagaatattgttgggcatatcactaggataaataagctctaagccgcaatcttatttcaagtggaatccattcgaagtagtgtgtaataatagaatcacgcagaatgtatgatccattcgtggctggcaaggcccgagcagctgcacggaaacccgcgccgcgagcgcattgctgaaagctcggcggcttgagttcaaacactacgatatgccaatattagcaggattccattccttgctataggaatacaatcaaatgagatggaatcacccaggtggtctatatcatcgtcgaggcatcgcggggtttttcgcttagggtttcaagcaacttctccagatttaattcaccacctttgaactggttcgaaagaagcgcccaacaatatctatgaatctaaaatccatttggtagatttgatggggggattttttctaataatttgctaacctcttcccagcatgtatcaatgctagagatctgttagctgacccccggctgcagtcaaatgaactaagcactaattagcaagtacttccaatagcagattcacaggatcaagacgcacgaaaaacgtcacggtcagacaaggatgttccgcatgatacacaagagcgagagaatatcgcatccagagccaggtccatttctgacttcttgatgatttttgagttgtttttcgtaatttggaagtagcaacggttgtttgtcgcttagcctagtgtcgctatcatgattgcatcatcatactcctattgcgaaaggtttccacagctagattagaaattaatcgtagtatgagagtagaagggctatccttgacgtctggagaccggctactacagcatcggatcccagatatatctgcactaagagtaggcttctacatcaatcaattattaagaatctaagaaagtccacagtttgttgaacttgctctcttccataaaagtaataaataaatatattgtatattgtgccttagtatgtactagtttctgaacgacacatcccagcaaaatcgctcatttatactggttgccttgtctgacagcgaaaaacgactttaattacggtcgttgttgaggaatcctagattgacacgcaggttagcatataaaaaggcttcaggcaaaaacaagggtcacgaaccttcagccttgttcagcagctggttaccaaagctgccactggaagagtcattgttgccagagttgccgtagctagagttgttgttgctgccgtagctgtcctggtcgcgaccagagctagacttgttgccatagctggaggagtcgttgtcaccatagctggaagagtcattgttgctaccgtagctgtccttcttggaggactggttgccgccgtagctagaggaatcattgttgctgccgtagctgtcctggttgccaccggagctggacttgttaccgccgtagctggaagagtcgttgttgctaccgtagctgtcctggttgccgccgtagctggaggaatcattgttgctgccgtaggtatccttcttggacccagagctggacttgttgccgtagctagaggagtcgttgtcaccatagctggaagagtcattgttgctgccgtagctatccttcttggaggactggttgccgccgtagctggaagagtcattgttgctaccgtagctatcctggttgcgaccagagctagacttgttgccgtagctggaggagtcattgttgctgctgccgtagctatccttcttggaggactggttgccgccgtagctggactggttgccaccgtagctggaggagtcattgttgctgctgccgtagctatcctggttgcgaccagagctggactggttgccaccgtagctggaggagtcattgttgttgctaccgtagctgtcctggtcacgaccagagccggactggttaccgccgtagctggaggagttgttgtcaccgtagccggagctctggttgccactgccgtagctgtcggagtcgttgcggtaagacattttggtgggttgtttaggggggattggtttgtgattggagtgaaaggaagaagatagagtgatgagttcaagggttatgatgcttatcccaccagcggcgagcgctttatttatctcccaccaggaagccggccagaatcgaatagaagagaatcgcccctcgtccgtaaacccctcaatgacaacatgtggacaagcgaggcgagcaggggccaatgaacatggcacggagaagctagtatatccaaagctcactagtttcgtgcttatatgttagtgattgctcgaaccttgggagccactttttcagcttaggagccacatttcagcttctgtggcctaatcgggacatgaccccctagttgacccataattgagctcgatgttgtgatatcatccaatctgcgaacagagaatcacgccatggagaaagccatgcgggactctcatttgccggtcgaatgatgtagctcttttccggagccggacttagccggagaggtcacttcccctcattacttggctcggtcattggatactgttatgcaggtaaagtctagactcctcgatctgatttgatgataggtgggatgtgtatgttcttaaacacgtacgggaagtacagagtagccctgggaaccctggaaaccctgaaggggccctcatttctttttttgggacaggcaatatgataatgtagtgagataagccaatcataattgaagatctggcatcttctgggcccacctaggcaagatctacctcgatccgcgctattgatttccatggtaacgtgatgcatttatctccgaggtccgcccggaatcttggtttggctttgccagtcccacggttcagataatgcacatccctcggtgtggctgtgcatgtgcaacctacccctcctcgacgccaccaaggtggtcagcctcgatttgactgcgacgtactcctccgtacaacatatcgaggacaagaattacccctatccacgggtggttttttgggtggtttttggggtagtttttgtgatgatttttgtaattggactgactacacgcaacacgtgtcaaaaaggtataggtatactgtacggagtagacaagtctgattttatctatcctatctgcgtagtctctgtctgggtattcattcactcattcctccccaagtatcattattactctcatccaattattggtttagttggagatcttgtcgctgacgtgcttgctgtatggtagaatcgaatgttagcagatatccagagcaagcaatttggagtgtcacatacccagtggccttctcgtaggccgagcgggcaccatcggttatcttctcctgcgtgttgcggtcgacgttgtagccagacttcttgacacctgcaccgaaggctgaggcaaagcattgtcagcgcaaattcgttttacaccaagaacgataaaccactcacccttgtcaacgtagtcgtcgctctgctggttgttgttgctgctgttgttgctgctagactcgtggttgccgccggagctggaaacagccttcttgatgaaatccatgatgatgatatgtgtagattatttggatatttaacagagatagatatgagtaaaaaagtagacaagaagaaagagagttgtatttgtatctggtcacagtagggctgcccctcttctgccaagtttacttgagtggcgattcgtcgtcattactccggtgtcttaccgcccccatgcctttccaggtatgcagtctgggtcagggtgggatggtaagacggctaattgcgcattgcggatcggtgggctaggctcgagcataaggaaccctaataggccatgatcttcaagtagtaaaagtaataattgagacttattttcaaatacaagttgttatatacatctttgaatgaaaggtaactccaaaaaaatgccatccaaatcaaacaaatcttaaacaccgaaacaggccttattggcagaccggatggcttccttctcaccctcgctcattgcgtcggtgatctcccaaggggtgttgcctaagcccatagcacgctgaccctctgggctcagcgccgaccaatccatagcacccttgaatcccgactcaccgggcccaccagcaccggggaaatcccacggaggcgaatagttcagcgcagcctggcgctgcttaagaaggtatttcacattcatgtcgcacagcggggtagcgggaatgtacataacactagagtcctgggtaccacggtgctccttgtccacggaatgaagagaatcgcagtgccacgcaacaaaatcaccaggcgcaacctccggtactgaaaccatagtcgactcgagatcgagatgcgggtgtgtaaccgggttgtactcctggcaagcgccaggcacggagccagggaatgtagcatccaaggccggttttgaggtttcgacgtcgaagaacggacgcaggatagtgtatgctgtgctgtggttgatcatggggcagacgtgcaacgagccctcgccaggcttggtgtccgacatagatagccaggcctggaagaaccgcaacatggagcatgcaccggcgccattgtataggtccatgttggcgctcagacggtgtcgcgcatcccatgcgtcgtattgttcccagttaccttcgaggatcttggtgtagactcgagagtactcggggtcttcccagcgctcgagggacccaccgtcaatgtgcggaccgagggtgaattttgagtcgcctggatcgcggatgcgtagacgatctgcgtaggtgagcggattggtggttgagatcttgctgttagggtcggatgaatgccacagctgctgcatgaagcgctgggtgttgagcatgttgctgtgaccgcgggcttcggcctgtgatggagtccagtacagctcgtagacagctggggagtcagccgggaaggccttgactcgttctttgttggcggccacatagtcgcgaatgcgctgcttatactctagggcttggtcccgggggactacattgcggacgaccgcactgcctcggtggcggatttcttttaatgcagcctcagacacatttccagagatcacatcagagtaatcaattgagggaatgatctggtatttgaaagtcagtcttttgctcggtgttgcgggttacatgtgcacgtacgtcgctgccctttgccttgatcttttgcacttcttcatccaagctagggagcaagcgctcccaactctttgtaattgcatctttgtttttctcgaagatttgcgctttcagatcttgaaaccgtgcggggagaggttctggcttgtagtcgggccttaagctggggaaaaccgatgagatatcaccggcggccttggttgtctgggtcgaggtagaggccgctcggacagcggatcttgagataaactttgatagagacatggctggagtgaattcaagctgcgtattccaactttgcggggatctaccccagtgctttatatgtttttcgtggggaacacaacatacattggtcgaggcggaatcattccatatacagtaatcgagccgccgccggaaagagatgggccgcgaaattactacattaggagatcgacccgcatccggtccgtacctgcaggcgcttaccataggtacagcttctgttcatgacatcagcctacaaatcattatttatgaggctaaggatgtcaataatggagataagttctttcgaagcttttggcggttcggagagatcattcgggaatatgccaagccgggtttcgggatagaacatctgcattcggccgaagtactacggagtatacaatacaataggaatggaacactacctgccataccacggcattaactgtggacttcaattgaattgaacctgcgttatcttgcttgaaggataggatcaagtgaatgttatatgtgctgcagagcagttctacgtatgtctatatatctcgtagtgaccccgagggcaattctccgagggcaatcgacctggtccacggtttatataacccaagaaccaaatgaaggcatgccgagttctctctattgtaatgtctcactggctgatccaaactacagtatctagcacatattcgcatcaaacaatatacataagtgctttcatgaatagagcataatatcaagaagaggggaactgctgtcagatggcctgatacgtacccaaggagaccggagaattagattggattgggcctcatccagccggcctcgtacgatgtacataggtacaaggatcgcggccacgttggcctcaatccttcctctcgtccgaccggttagattctagtattctaccccgcgaggggcagaaaatgggcacggaatatgtatgccgcgcaaggtccacgatgtccactctatgtataaaagagggctgaatcccctgctagaaaccgtataactcaacccgtcaaccgttaatacttaaacatgtctatctctgtgcaaggaaagaccgccatcgtaactggagctggctccggtatgtctcctgcatactgcaatatcaaacggaagcttacacgtagtcaggtatcaacctctgctttgccagattgctagttgaaaatggctgcaatgtcctaattgcagacctagccttgcgtcccgaagcgcaagtgttcgtcgatgagcacaagaccgattccccgcgagtggtcttccaagagaccaatgtggttgactgggctcagcttgagcggatgttcgaggttgccgagaaggagttcggcgagattgatattgtttgcccgggcgcgggagtctacgagccggtaagaccaaaaaaacccccaaccaatctacaagtctaactagaacaatagctctggagcaacttctggcgcccacctggcgcgggcgacagcaaggactcgcccactggcgggcgatacgctataatcgatatcaacctcacccacccgatccgcacgacccagttggcaattgctcatttcttgaacaactgtaccagcggtcgcccgaagcatatccttcatatctccagtattgcagcccagaatgctaatctcgccaacccggtttactgcgccacgaaacacgccattagcggctttgtgcgttcgctcgccaatctcgacaagaagtttggtatccgagtcacggccgtggctcccggtgttatcaagactccgctctggactgaacacccggagaagatgaagttgattgatggcagcgatgagtgggtgacgcccgaggaagtggccgaggtgatgttggcgcttttgcagcaggatgaggtcagcgagactatcggcgaccggtcgggtaatgggcagcagtttaaggtggagggaggtacgattctggaggtatcaaagactgtgcgcgcagtcgctcaattcaatgaccctggtcctggcaatcgccctggaaacacggcgtcggatcatcacgaggtcgaggaggagacttataagatcctggagcagaaaggatggggactgtgaatgttatagtcagttagtatcaaatacaactccgacaattgtataaatacctcgaagtgcttgaaatggagttgatgttgtagcaaagtaccaagggcgggtcatgtgtcgacccgataagctttggaaagtcaaggttgggctctcaagtggccacggatctttctctccttaaattcctccgccttttccattctccagggcttttctcttcattgcaaaactactactaatctctctcttttggttttgcctcggccccgctggtagcggccgttaattatgttttgcacgccaatcgaccgataacaccatttccgcaacagataaccaatatcaaaatggaggaggccgcgctcggggttggtccatccgggggacatcagaatatgctgcgcaggtaggccggagcccaatatcttgatgttgatggtggctaatttggattccattagacgtgcagcccgtgcaagacctggagatgtcgtgggggaggccagttgggccagcagtgtgatcaacctggttaataccagtaagtgcgaggaagcgcaccatacaagagtgctccgaattctgatacaatttctcctgcagtcatcggtgccggtgtgctggcgatgcccctagccatctcccgtatgggaatcgtcctcggcgtctgcgtcattctgtggtctgcggtcaccgcaggattcggcctctacctgcaatcactatgcgcacaatacctagaccgtggaagcgcctcattttttgctctatcgcaattaacataccccaatgcggctgtggtctttgactgtgcgattgcgatcaaatgtttcggagtcggcgtgagctatctcatcatcattggagatcttatgccgggagtgacacagggctttgtcggtagcgagcctggatacgattttctggtggaccgccacttctgggttacatttttcatgtgcgtagcctcgtgcattttgtctaaacgaggggaagtgctgatcatttgactttaggctgatcgtgattcctatttcctacctgcgccgtttggattctttgaaatatacgagtatcgcggccttggtgtccatggcctatttggttgtcttggttgtgtataagtttgttcaaggagacacgatgaaagatcggggcccgattcgcgtgggccattgggagggcgcagttccgactctcagcagtctgccagttattgtctttgcatttacttgccatcaaaatgtactttcccaagtcgtgactcgtcggttctttctaacaagcattttagatgttctccatcctcaacgaaatcggcaataacagccatttccgcacaaccgccgttgttattgccagcgccggtagtgcagctgcaacctacatcctcgttgccatcaccgggtacttatcctttggcaacagcgtaggcgggaatatcgtcggcatgtacccaccgggcgtgtacgcaacgatcggccgcgccgcaatcgtcatgctagtagtcttctcttacccactacaatgccacccatgccgcgcctcagtcgatgccgtcctaaaatggcgtccccgagcacaagtcgctggcgcagagagctctccaaaccgacacccacttctaggcccgcgcggaaaccgcacgccagagccaatgagcgaccttcgcttctccattatcacaaccaccatcttgattctgagctacctagtcgccatgaccgtgtcctccctcgaatccgtgctggcatatgtcgggagcactggcagcacgagcatcagcttcattcttccgggcttgttttactacaagatctcatcgcccgactcgcctacccaccagggcttaatgaaagaggacgatgaggcggaggatgatctctcaggagatgacgacggcgacgacggcgagggttccctcgctcgcccattgacagagagtggccttttgcaccgtggcacccgccactggcgcaaggcgctgcttcgccgactcagcctggcattggctctctacggcctcgtcgttatggtggtgtgtctggttacgaacaccttcttcaaaatctcacattaataggccgcgtcctttatgtatgaagtctctttccccttcttgttggccggagcccgtctttttaacatctttcaacccgccgtgtatctcaggaacttctcccttgggctttctcgcctgttcatcagtctcatttctctttccatattcttctccgtttgcgcattgctctctatgttcgctgctgtgtctattctgttgttggtattgctctttgcacgtttaagttttatttgatttgggttgtccatgctaggcgtttggatgattgtgtgtatttggctcgatttcttaatctatactgttggctgcattattacgcgggtatgcaatggctaattgctttggtaaggaaaaaagagggaagataggattcaaggcaaacttacagcgaacagagttataagaattcaaaatatgaatgaagagaagtgtacaaagtgattaaaagacccgatgtaaagcataaaaccctcattcgaaactaattccgagaagcaccaaaacgcaagcttatttgtcaagtttgtttgctatcggaccagagcctgctacaagtatgcatgtatctctcaaccctcaagacatttcaatgcgcaattagttgttgttgttagcaccgttcagaatccgcagaatggacatgaacaagttaagcacgtcgagataaagcgagatcgaagcagcgatctcctcctcaacgtgatagtgccgcataaccaactgcgtatcgacgagaatatagcccgagaagacgagagcgccaagaacaccatagatgatctccatcgtgctgttgaatgggatgaacatagccacgaacccgaacaggaccatgaaccacaacgcgccaaacaggtatggcatccagtcggtgaaatcgtacttagtctggcatgcaaagagcgtcaaggcgacgaagattcctagtgttagtgcgagcgcttgcaccactactttcgcatcgtagaaagatgtcgccacgctgattgagtacgcttcaaggatggtgaagcctgataggaaaagaaggttggtcgggtaggactttcgcttccagaatgttgcgagcatgaatcccagagcaccgaaaactgagattatcatcagccagaagttggactggatccaggtgcggtaggagtcgttaaagaaggagattgagctgaggatcgttgtaaggaggagttgggccgttctgagcgaggagtgttagtatattagagcccacgcacttgagtctgcgtttgtaaatcgtgttgcacttacagaatcgagtacactttgcgcacgaattgcattcggatgtcaatcgttccttcggcgacggtacctccgaactatgcgattttatcagtttctgtctttctagccgggctcaagacccctaaaaggcatggtaaatgcataccttgaaatcatccggcagattgtcatcctcaccacgaggcgttgactccgctggagccgctgtggcctcgtaggagggaggggctcgggagtaagacgggtcatctaaggagtcccgctgaggagcaggctcgtatctggtgtttgcagccatgatggtatagagatatgtttggtctcgcggcgctggtgttgaacgttgaaatggatcgccgaccaagaggaagatgagctgaagcctggaggtggagcccatatgatgtgacgagtcacgtgcgataagccacatgtggggcgcgcttgcttatgttatacatacactttgctcgggtggcgcccacatgggtaggtggaccggggacagcattctatatacttttcactgtattctatttttttgcgggttaatatctcgaagatataagcacaggaaagacttcgaatcatataaagttctaaaacgctttcaatatttgagcttttataatgcactcgtgtcagatgaagcagcagaacagactgctatcgacttccagacccaccgatctatgaagaatttgagttatccgcacaggaccacgcagctgaaccaccgttcgccttgtagctgtccataatgctgacgacagacccatatgtaccagcgaccatcatgaaactgccgatgacgataacaaagacactccaggaaaccatgaacatccacctcggggatcggtcgaccttccccttaccccagttatcgtacagccacatgcagcccatgggttggaaacacatgaatgtgccgagcaaagcaccgataagcgagacgagactgtcaaagacgggaatggcacttgcgatgacgtaggaaataataccgactgctgcggtgcagccgatccacgagccccagtgcaccatgctgtttgatgtgaggtgtttggagcctctgagggcgcggacgaagacgaatttcgcgggcaactgtcagtgatgtgttagattgactggatcgcatagataaagagacctagagaggaagtgcttacatgaacgaacagcatcacagtaaccagaagacctggaatggcaaagccatagctgaccttcttcatcgtatcgccggcggagccaagagcaggcgaggcaacataagagccgcagtagtagtagactacaacgccgatggtaacgtagacagccgtcacgctgctttggcagatgatcaacgagcgagtatagtatttggggtcgcgcatttccgatacaatagagaagaatgccggtgtgccagcgtaggcgaagataatcgagctcacggcactgatggcttcactgaatttgggactggcaacgatcttgtagtcagatacccagatcccctcttgtggggctgaggccgggcggtcctgaacgccgacagcgatggtgacgatgaagactatagtacgaatcggttagggctatgttatatcccgtgacatctagggaaaccttacttgcggccaagatgcaagtcagtccaatccacgctaaccaactgatttttccgagagttcggatactggcgaagataattcctgcgacggctgcaacagcaacatagacagccgtgcatgtggcatgactcgagacggagttgagagcgattgacagaccgagcattcctgaaccggcgacgaaaatccagtctagagaggcaagttagaagcgaatctataatcgtgatcattgcatagacctacataggcagaacacaaagccgaaaacctcacgaccgatcacaccgaacatcaagtaacctgcatcgtcgataccgtagactgagcgatggttgagcttaaacacgccgaccatgtagtcggaccacgttgtaataacagcaacgacgatcaggcagataacgcctgggacgaggcctaatgtatcaaaggtgcttgggatggagaggacaccgaggccgatctggctcttcatcatgaggatcaccgttcctgcccatcctacctaaagaggcgttagtttgacccaattggacattccatggaaaagaaaaggaagaaaagaggaaaagaaggaacgtacatttcggtagttgggtccggattcggtgatctctccaaacacatcatcgtggttgttgatatgactattctggatttcacggctctgagatggatcaagaccttcaaggtctttttcgtttttgatatccatcatattgaagaatgggaaatgggaatgtaaggcggatacaaaaactgggtctcgaagtatgcgggatgtcgcgcttataactacaccggatgtctgaccgatgggccactacggccacccagagagacagataagggctaatcacttggattcaacgaaagtaaatggtgaggcgtctgtaatacccattgtgggtactcggtacggagtatattggctcactttacaacataattctacgctagcccggtttcagaactataaccccgtagatccaccagaagctgggcaatgataaattgttctcgagcattttgaacgccttttgaacgtatgactagtccgtggagactatgtggagtacaagtaggtacctaggtcaagatggttggacactttacaaggttctccataactaccccatggggagacgcggagaagttcatagttgtgcaaccttaactaaacaacgttacgcctaaagcgcccagagcgcccagagcgcctctccggatacctcggcaagatgcgtaaaataagagaacacctatgtatttatgctagtacatggacgatcttcatcaatgttatcaggcacgttatctatagaacaacaaagtttaacttacatttcccttatgtacatttatatagataactgctaacctgctattatcaaaccccccagataagctgaacatccaagctttgccacggcagtaccgacgtcagcctcttaccacatcgtgaggggtttaaaagggggggaaagctaaaaagaaggggcgtaggtggcttttcccttcgccaagcagctaatcaccggttgcttggccgctgatgaggcatttgcttccgagatcggcaaccgtacccggtcattgctaaagtgtacgtaggttctttgtatgttgtactccgtacggactacggagtagatatcatggctttcctattatgactcatatctctcttttctagcattgattagacgaacaatgcatatttggcccttttggtccggtactcgagagtgcgatagtgcgatcgtcggtgtccggaacagataggaaggtacacatgggccaactgcaattgtgctgcgaatatcaagggaatggatcaggcggtacatgcgccctgttagaatattttacgtacagagtactcagacaaagcctgggcgctctaactaggacgtcatttttcgcttaaattaacatatggagtagttgaaacctcgagcaacgggtagacaggatcctaacgtcagtttgttcagtatgatccactcctatcatttctgtcgcattctttaacccttgttagttctcgcgtgattttccctcggaaacctatgatctagaagagtccgtgaatgtaggatctatgatgtaggatctacaacatgcatggagttgccttccagaaagccctaacataggtgtcctacactaagacaaacaaagtaagatcgatcctatagataagacattatcaatgacaaaaaatatatcgttgaatcctggagcctggtcgatcaggtcgataggcaaactatgaggtccactggcttgatcttgctcctttgtctcgctcgttcgcagcaacgctcaatccgtgcttatttccgcctctcactcctcacatattcagatatcgaatcgatgtgctttcatacgacatagaatacccatcacgatcgtcgcttcactgccctaacatcccattgacatgccatattggtggcagtgctggcatgagtgtttcaggcaagggatatacagtaatgaacaagccggcagatatacaccgctaggttaatttcaaggttctgaagacaaggagctcgccacacaggatccagacacacccgaggctgaccaatgcgagacatttgggttcgcgcaggagctagcccgggaccgcctgctttagagacatcgccagattgggaccttcagagtccagaactctcgggcgaaagacccatgcagacaagcgcagtctccctcacgcaatatccgtgcccgccttccttcttctatctgatagaatccgagaggacaatgcgactgtattggctgcgctgacggaaggagaagaggaaggaaggagcaaaaaagccactcggcaggcctggcgaacaaacacggcaggagcacgtaccagacggataccattccgagcaaactactatctcgacgtgactcgggccaggtacccgtacccgtaggcgtatcttgtaatatgtgtgtttgtcgcgaagagaagagctgacccgaatcccaatattaatatttatgcatagcaagataagaagtatatgcaaagttactggagatatctataatttcacatcacatccatcaagcgggtgacggccccgacagagaatacccccctgctcatcagcaccgataggcaactggcgcagcctagctgaaacctattcaataatccgacccatcgtgtctctgcgctctgaatccggtctcgattccgaatcctcgtctgtgctcagatccgcctcgtcgtcttcgtccgtgctatcgtctccgccgtctgccatatccggtcctacacttgcgctggacatgtaatttggtagacgtcttcgctcgaaatcctgcgcgtgggctgaggctacaatcgagccgacccggctgatgccaaccgaggggcggcggttgcgggcccgcaagctggacccggacggggtgccgttttcgacatcgccgggcgccatgaaaggtgttgaggcgtgctgctgttcttcgagttggacatcttctgctgagccgtcgaggggtgctgcggctcgtgaggggacatcgtaggggagagggacatcacgggaggcgcggaagaggaggacattggtgcagtgttcgttttcgacacggaagatggaccaaatgccacggcgacagacctccgagaaggcgaccataaagctaagcagggcggactgctgtatatttttgatgaatattgcgtagaagatccagttgaaacggatcaccacatcgagcaccattgcggcatagtatacccatacgcgacggaaggcgaggacttcacggagcattgggttctttgcgtatgggttacccaaactccaatccatgattagatcccacactgaggtgtagacggcgtttaggagggcgaaggtgataaacgaggcttggaacctcgtttgaaggtcgatgcggtacatgctgagagtggcatagtagaggacaccgaataaatacttgcccaagttcaggagatgggggaacgcgttcttcgtgtccagatatcggcgaatacattggaaagctcgccagacagaggggaggcattggaaaaagcccaggagccgagagtgggaggagttgcacttgggagggtagtcccagtacgaggcatatagacagaagaagagctcgatgttccccatagcatatgtctgagaacagtacatgtcaccgaggaagaaatcacggaactcgactgggtagattccggcaagcaaaaggcgccactagataggttagatatgctaatcgacagtaatatgatgctgtatgaactcacattggaaaatgcgaaccatttgcgactcctgtggtaaagaacacgggccggcaagaaaataatgatcacagtcaagccaataaggacgacaggccaatagacatacatgtggttgtaccatgagaagttgagccacatgaataggcccatcaagaaaaggaagaaagaagggatctgtacttgtcaggatgaatgatcagagctattaccgcgaaataagacatacctctagcaactgacgccactctaaggtgtttctggtatcgtattcgaagacaaatgcatgattgatcttcgactttgtccaaatcatacaatccaagcagaagagcaagaaatggaagacgatcaggaaataccctccatatatctgctcgattggtcaatggagtcacacaaaagacgaaagagcgaagaaccaacctggaggagataactggtccgaacttgttcagcgacgttaggcgagcggagatttgacttagaatcaaccaaggccttgatggcaaacagagttccacccatcaacaatagaccggagcggaaagtattcggtgagtaatcaccagatttgttgattgtgtgacggagtttggagacggcgattttgcgattaccgccctcaaagtaacgggcatacaagtcttcgaccgctgtcatcaaactctcaatcacctcactctgtacgaaggacgctttgttgaccttttcagacatgtaccggagcggtggacgggcgtggaccgctttgtcgtatttcttgttaatcttccggaaagccgttcgattcaaataagcatatcccttgaggagctccactccgcggtagaactcctgcaacgcatgcttgagcttacgcttagcggagcgatagggcacttcttgactttgcggatcctgccgccgcatgaagtccctccggttggcgatgaactcccgatcttggggttgcatgccgggagtcgccatctccgccagtgcttccgagttcttgccgaaacggttctttcccaccaacgaacccttgattcgagcattcgtgattttcgcgaacccatttggtcgttgatgtgtctccgagtcatcggatttgattctcttagaagccaggacctcttggattcgctggtctcgcataatatgtaactgctggcgaaggacccgcagtttctcggtggcctcttgttctttcgtcacataaaacgaatcgattttgtgcaattcgctatccaagaactcgaagaattcgtcccgacgtttatcaagctctgatgtagcgctagggtctacctctgccgtaaacacgcgccgcagcagctgtgatgtccggttgcccgaggccaccttcgtcaaggcgtcaccactcgaatagctcgtccgtggatccaattggggcctcttggccggcaatggttctgataaagggcgagagggtgagccgttcagcatgccacgtcgatccatgaccggcgaaggtgtccggagattcccaagtctatctgcagtatcctcatgtggcggatagtcttcacccgggtcaagtgccgggtccggaagttcaaatgaggctacatccgagcctgcggtatggtgctgttgtggcggcgttgcgagtatgcttccataactaccaacgttctcagagaaccgcgatcctggcgtgcgaagcggttgtctctcagttttgggcaccggcgtggagcgcgctgatggcggcttggcaccacttcgtcgtggcgtcgatgggccattgtattctcctgcatcgagatgcttatcggtattggagggtgtgagagcagattggactgcgccgcgactttgcgggctggaagtgggcggtcgataggacgggacgcggggactgcgatttgccttctgtagggcccgggtgatggccttgactttcttcttgccagtctagacagtacattcaggtaagtacagctgtgacacaatgtggcaatgatgacgaaccttgtagtcgagatactttgcccgccattcaggaacgagttcctgttccagctctctgcggatttggtcagccactggaatgtcgcacactgtcacgggggaatacaaacttggcaaatttcatcctgaccaacaatccaccgtcattgcatatggtttcgaaacctggagtgccggcgccgatccgaacatcaaatctcacacaagtgcgagggttccaaagctggagcaagagtaaacgaaagcctcgccactcctgagtcgagataggggaagacggatagtattggaaagaggacctcgaggaaaaacaagtatgttgtagaaattccaacgacgctatactcagatccgaagattctccccagaaaatctgcaacgccgcaaactctacggagtatcgcagctgaacctatacttttggcacgtgtatgagctcatccacgggcggcgcctgaattgttaggccgcaagcccacacttggtcagccttgtacgctgattggctgggacgtgatctcagacccacaaggccagattcctgaagtttggggagtccaagacctgggaatatcctcacttctttcatactccagggcttatgaagtattgacccgtgcaatgatctatcacttcttatgcagaacgaatacgaaaataccccgagaccgacgcaattcatcggcgattgacccaacgactgtctcctatctaagatacggcagcattggaatgcggccggaatgccgtcggcgtgttctcatggtgatgactggcttaagaaaagccccggcatccctgtgaaagcttggcgcattttctccgtcggaccagtgtcttattcgtaagtagacgtacgtagccctacgtatgtctatcggaactatgccatgcaagttcatatcgtgcatacatatgatctcggggtagggatattgatatcgattttggattacattggatgcttcgtttcaccgctctttgcggatacgaggttgaaatattcaaattgttcgatggatcatatctctttcttactacataccaccagaggggtgttcataaaacaagtttcatcattcatgtattgctatcctcgacacgactggcctagtagttgcggttgtcctcacggtagttgtcgcggccgttgtcgcggtagttgtcgcggttgtcacggttgtcacggccgttgtcgcgaccgttgtcgtgctgctcgtaacgctcctcgtacatgtgctcgacgttcttcttggcgtggtgctcggccttctcgcggtcaagccagttcatgcccttggtctcggcgagcttgtcgacctcgccgccgaccaagccggcgatgagctccttggccaatttgtggctggaaggcttgcctgttttcaaatacaagtcagaagattgtccattaatcattagttagggacgcaatgcgtgtcacgtaccctccttgcgctcgtggtcctcgtaggccttcatggcagcaaaggaagcggcaccggcaacgaactcgtgagagaacttgccctcatggtgctgttcgccgttgtacacctgctcatgtgcccgctcggattcatctagcctggcgttagcatgattttcgtttcaatagccaatggcgtgatgttgggatattgccggctatgcaggtcgggtcggccctagtgcatgcaagctgtaaggtatgtgtctaagggaattcgaacttaccccagccgtaagccattgtgtatatagatagatgaaagtagggaatagagaaaagtttgtatagtgatgaagaaaagaatacaacgtagtgcggggcgatgaggggatcttatacccaggcaagagagggactacagaatactccagaagggctacgtaggtctacggggtacgttgtactaagattcgggtatagctttctcccctctgtctcagctggagttgccccaccatccaatctaccagaatagtggctgagctggttcaacatgtatgggatagatatgtccgaggtggagcgaagacacccttccgccacacaaatcagacacaactttcagggtgttggcccgtggctgaagctggcagatgcttccgaagaacatcctagtgattattgttgcgtatcttcggcgatgcaggcaacttcattaggaccggtggtggaatcatcccaccaccgcatcgctagtctccgacttcattggaggaccacttggacgggacttcctgtcacaattcccgaattaccgccaggggtgttttagcttttgccggatcccagctgaactgctttttggtccccgggatcgatgtttggtcaagggttgccctgaaagacgctacatgcatgcccagcgttcagttcgcccaacaacggacaagtagcatgatgcactgtgtatgctgtaccaatgctgcttccgcatggcgctttccaaaaacttggacatccggtacggagtacaactttcgactcgctcattacgaggacgtgtcccaccaatgtccaatagcatgtcgatctgatggacccggatgggtcgtctcagccctactccgctatgaattgacgaataaaaagatgagacacaggataccagatccatttcaggtcatttatacggtatgcgttacgcacatgtgcagttagaaaccgatcagcctggcttgatcgagccaagcctcccttctaaggcttgtcgtcgccttaaaattctcggcaacaccagccacaagcaaagtggcggtgaacatgtaactgggtgcacttgcaatggcctcctacaacatacggaataatgagcagtgactttgtagaagtagtctttgtattggtaaagatataatacgggtgggctgacctgaaactaagtatgttgtacatagtacttacgtacggagtactggaacatctggctctaagccacactcggactaaaatagcatcactacgacatgtgtcagatcaatacactacttgattagttactccgttgaacaccaccacttaactatagccaacgtatgaagatccctttcccttgaaacaattgaatgtttcaatctctcgatcagcaatcgcgaatactatcacagtaacagtgagatcgtctcccaattaacgtgaaacccttaccgtaaatactctgtatcgtgtccaaactagtagtagtactccgtagtactccgtactccgtactatgtaccaacaaccctccgtggctggaaacatgagctctgcgccacatacgatcacagccacactccgcggcattctctgagctcaagctccaagctccagctccaagctccaactaaacttagctcaactcaactcaattcaaaatgcctaccaaaacccccgccccatgcgacttcccatccgaacttaccgtgaccatcacacctgccccacccttccccgcccgctcccaatcagcatccccagccccaaacatcctactcctactccatggcctcggagacacagccgcatcgttcacaaaattcgccgaagccatccggctcccagaaaccaccatcgtcacagtgcaaggcacagcccctctgcccttcgacctgggcggcttccattggggcgacgatgtctccttcgactccgcgaccggcgcgctagacatggacgccggcatgacgcgcagcacgaggattctggtcgaggacgtcgtgcgggacacgctcgtacagaaatgcgggtacgcgctgcgtgagattatggcgctgggtttcgggcagggcggaatggctgcgctggctatggcgcgggagctcgggctgaaggggaaggaagctggaaatggtaacggtaacgcggacagtggggaggttggtaccctctctggtgtcatctctatcggggcgccttatccgttgtcaggatccagggtcgggaatacgaatcgcaccccggtgctactggttgctggcagggattcggtggcggtttcggatgaggcggtgcgtaggacaaagcaggtttttgagttcgtcgaggtgagccggtatgctaggcggggggatgggatgccctcgaatcgggaggagatgttgcctgttatgcagttctttgcgcgcaggttacggagtagacagggtgttcctgagggcagtgtggagattagctgaacatacagcattacctgtgtaaattggatgtcagttcacgatttcgctttgcggtccgagacatgggtgtaggtgcgctggaagacgcaattgggcacatcctggcgtctggaaaatgggtgactcgataacctcgataatggtcgggaatcgacatatcgattttcagctggcgacattctgtaggtttccgtagtccgaactagtggcatattcgaactatcaaagaggggttacggcgccaatcgacaacgcacaattggtcaggacctcgcattcgtcaattttgatcacatccaagtcatctgatcttaatactctttagtataggttcattgcctagccaagctatgagaaccacctctctcaagaaattctctcacgttctaatacaccaaacccaaatcgcaaaaggtaaccatcgatgatcacagtgctcaaaactacagatatgaggctaagactgaccgcatagaacaaacaacatggcctacaacctctcaatagaggtcttcggttccggcgatagccccacacaccgatcccactggggcttcatgatcaacaaacccgggaatctagaattcggagatctcctccaagtcgaggtcgtcgattcagaccggttgtggtacggttttgcgcctcggtacgccacaaagattatcgacaaagcggctgtggggatgtgcaagcttaccgatctgacgtctcaacaacgacacgacgtgatcaagattatcgagaaggtgcctgctcctaagaattcaattggcctgtgccaagattggatttttgatgctttgttgtctttggagattgaagagtttgttccttccggtacttctgctttctggaagggcatggttggcagaccggcacgagaagttgctgctgcttgtgggacgcagtggactgcctttgcttgatacgtttatgtgtttggatgctaggtcagggcatgggattggaatgattggaatgtcagtgaagagaagataatagtatttgtgatgaattgtctcgtaactctagtatataaaacgccttggtatataccaaggcatggtatggcaagtgcccatgtacatagttaactgctcctttctcgagccccaatgtcgggtctcttcacggtccaagggatatcttcgcaaagcccacttttatgcacctatgttcaaatataaaccaccccgctgtgtactgagactcctcagaacccacagaatgaatcaagcccaaatataaactcccaaccatatctaaatgcaaccgagcacaaaaatctaacaggaatcatttcttaatcccaataacagccagattgcgcggactctggccatactcaaacaccgtctcaacccaacactccttgacagagtcatgctcacgcaggaactgccagcgatccaccacaatagcagcctcaacaacctgagagctgaaagccatcagactccacacaatactgagattcttgcgcgtgtgcaagtactccgtttcatagcgctgcaactcctcttcagacatggtacagatgcgcttcttgaccaactcgcctcggatcggatccaggctcagtttgaccgttgcagcccgtacgtacgcagagaaagactcgaatgcagacttgcggagcgacccaacgatcagcgctatacccccggaatcggggctgtcggtgtggtctttgtagagatcatcgggcacatcgggtttggggacgatgccgtgatctagaaggacgcgctgcagcagagcgcggtagaaatggcgcgtgaagaatccttcgctgtcggcgtggccccagttatgaggtgcctgtacggccattgagcgggctgtgatattgagcttaaaacctgttgtggtctttgcttggtaattttcatagagtttggacattgggaatccgtgcgggtcccatgaagatccggtctttttgaggcgggggtgggcggatcgaaggatggggattttgtatgttgctggccccaatcgttcggttagaaggttgtagcagcagccgatcatggcgattgccacaacagaagggttgagtactagtgatcggactccgtggtggaggaggtttccgcatgaatgcagagagaccaccatcacccgcgcgtcacttggtttcttttcagactgcacgatgacttcttctgtgctggtcctggtttcaactgatgtctttgggtccacgacgtgctcgatgatcggttccaggtagccatcttggatattatgttcgatgtagctgacagtgcctctggtgtcgacctccggtcgggcctttggtacatgtactacatgtggctttctgtacatcgagccgagcacatcatcggcttctagggtcatatcggctagcatgttagaggtggtgtcttcattcagctcagcaggtttttctggcactgcatcgctcaattccaatggtgctcccatattcaagtcaggaacctctggtttttccgcagtggctaggtctggggctagttctggggtttgcatgaattgcctcttcaatttgttgtgctttgcattatgcattgtcttgatcttttcctctttagccagtcgagcatgaacgtccatacgactagcaccgctgatgtattggtgctttcgctcaatggcaatgatatgcttatgatagggtgagcttgccaacatgcgccccaggtagttctgccccgacccaaaatcaacaatgtgagacaatggctccccgcgacgctcattgaccgtctccgacaaagatgcgacatagcgagagaattgctccacctcgtgcttcttcttcttgttcatgccgatagcgatatgcatcgggagaggttcgctcttctcagatgtggtgaactcgcgacggaggctgaatcgtcgaatgtcgcgaatgtactcgaggagagatgcaggcgggaatgcgcttccgttccaagtcctgccattctcggaactagcgtttgtttcggcgggttcgcacagcgggccaatatcctcccgtagtagcagttgcaggatgctgtggatatcgtgatgctcgaaaaacgatcgccagtcttccggcagtagggatgtgtatagatcgggatcgcgcgtcaggaaatcgaggatatgcacgccaccgcaaaggttcatgaacatgaccgactcggttgcgaatgagaggagggcctggacatattcgtcgggatccttccactcatcggagagtggaagggggtttttaatcgtcatgctagatcagatgtcattaaaagcacggaataagtcgtcaattcgtagaatgagggacattcgatatactgtggggaatgttatcgcttttttttttatcttcccccgcgcgccgctcaaggccgcttagtcatgttcataggtcatttcaaggacgatcatctgaagacaccacgctagaaggagattgtcggatgttatatagcatgtgtacgcatattgcttgctacagggaaccagatggccattaaaacaatctagtcatgtcattgttcaaaggtcatgtcaaagtaagaagattaacataggacaagacgatgtgatgtaaacagaaatgcacagttgagaagggacgattcaggaacacccgtacggattcaaagtccacattcaagttgagatgtagtcggtagctgcagggttgtggaagaagggtaacaccgtctcactttaggctacctaggatagtacaaagaaagaaaacatgacaaaagattgggagggttgtattccgtgggacagtcaatggctatggagtccggatactcagccatgactttcttagagagctcgcacgagaactggactttgatctggtaaaacctgcatggacctcaacaacctggtgatgttgatatccttgtaggtaaagtaccctgttctctgcctgcactgtctcatggggctacggagagatggcggtcgagagggatcgggagaagagaagaagaggaagtggtggaggagcccttttatatggtcacttctcacgtgccagacatggcaaacaacgttaaaggaaggaacgtagcttccctcgtggtcgattgctcttgcctcgctccaggtggcaaccaccatgtctcttctcaaacatctgaaccacaacacaccgcaccagagtcgacgtacgggccatatttgtgtaccttaaagctcatcaggacggacaagagtttcagttgttcggccatgcctcagccctcgatgaatatgtggttgtatctgcctggtcattgtcgcctccgtagtgtgaagatcagattggaaggggtaatttccatgagctttccaaagttgcattcagaagagttactaacagttgattcctcatctagcaaatccaaacaaggccattgctcgatccgtataatcaccgcaaactatcattatccaaagcgctgcaacctacactatgtcaggtttaggatcaatgtctgatacctacatctttagtgagagcggcttgtaaccttttcaaaacataggcattgaaccaaggcccgcatttgcgtaaggcttaagaagagcccatatactgaaccacctaagccaagcttgctccaacgtgcggcaagaaacaatgtgcaaccccgaggatcccgtcgttccacatctagactatttccgaggaagttgaggatttgctggttaaacgtccatcctcatgcaaagagtttgtaacactgcatgccccatacttgtgccaaaaacggagcctcatagtcgatataatcctcacaggcgttcactagatccgtaatatttcccccctaatagcccgagtcgctcatactccagccgaagcacctcatcgatgatatcccaacaagcgtatctcataccgtcaacaacgtaaggagtaccccgtacttgtgatgctagttgggccgtgcgttgggccgagtaggccaaacctgcgcggttgtcctaaaatatcaccgtagagatcagtcagcaacaccgccgctccaggcttacccgtccgtggaccaacccggggccgagaactatcaacaactcacaatacccataccgcagccatggagcacgcagacccattcctacaagttcaagcgtgagctctacaccaactccaagcgcaagtccccaactaatcaacgtaccagcgatgtggtctcaaccctacaaaccagccggccactcttctcctcatacctccgcatccggtcactagccaaaagcccctccaacccagaactcaagcaagcgcgctcggagctcgaaagcacattaacagagctgacagccgacctcaacgacctcgtcgagagtgtgcgcgtaatcgaacaagacccctaccgctttggcctggaactagaggaggtgcagcggcggcgcaagctcgtcgacgatgtcggtgatgaggtcgagaaaatgcaccaggagctacagcagactgtctccaactctgccgtcgacacgctgccgaaccctaccgagtttgatgcggcgcttgaggaggaggaggagcgcggccggggcggggacgattattatgcctctttggagcagcagcgccagactgagcttatgcatgagcaggatgagcagctagatggtgtttttcgcactgtgggcaatctacgtcagcaggctgatgatatgggtcgtgagttggaggatcaggctgtcatgattgatgaggttgatacgctagcggaccgagttggggggaagttgtcgaatgggatgtcgcgtatcaaacatattgtgcgcaagaacgagggtaggattcgcttttttattttcccgtttactcctaatctctactggatggacggtttggtatggtatgggaatctcaagttcaaactaacttttctgactagatacatggtcctcgttttgtatcgcagcactcattttcgtcctcgtcttattattaatcctactcattgcactgtgatgatacaaaatcaaggggttagttaaaagcaaaaaaatcaaagggggttggcgtttcgggtgcaaatggtttagtttcgagccttcttgcgcggacgcaactcactgtcttcatcggagtcgtctccgtccagttcctccatatcgaggtccatatcttcgagctcttcgccgatttggaaggattgaactggtcaaagtcagcaggggaacatctgactcgttcgggatctacataccgtagtagctgagcgcatcgggccagaggtcctcggcaatggcaacagcaaggtcatctccatcggggaagatatcgatttcctcaactccctcggtgtcatcttcctcatcctcggagtcggagtcaccggcctcctcgatatcctcgccgttctggatcttggcccagcgagcctcgatctccttggcagcctccttggactgagcggcggagacatcacggccgcggtatccgaagaatccgaagaagctcatgccaacggggctgggctcctcgtcatcctcgtcatcctcgttggcctcggcctcagcctcctcgaccttcttaacgagagcagcgaactcgggcaactttctgcggtcaccgcccttcttcttctcagcctcggcaaggtcgcaagcggcatcgagcatgcccttggtcaaatcctgatccttcttccagttgatgcggacgggctcggagaccagaccctcccaggtgcgggtcttgccagcggcgttcttggagacctcctggcgccagtagaactccttgacgagcttctcgttggtgaagaaggggttctcgtcgccggtcttgaactcaaatgtgaagcgcaagctgcggggctcgccgttgccttgggcgtcgagctcgaatcgctcgacgttcatgttcttgaggcactcaccgagcacttgggcatcggtggccaggatgtactcgtcgatctcggggggagcgctagcaaagacgcgcatccagaactcagcctggacatcggggatgttgatgatctcgctgcgcttctggatcaggggggtcatgagcttgacggagtggcgcactagagtgtgtatgttagcaattgggttatcgataggtgcgcttcttaatgcatggtagagtagcctctgcgagctgttcactccataacaaaatagaaaatcaacaggaacatacactgctcaacctcagcacgggcgaactgctcttccagaacagcaatcttcttcatagcagcctcagggatgctaggcatctcgacacggtcaaggagggactgatcgttagacatgatgggtatgtattcgtgaataagggtcgtaagtaaataatgccagacaaacacgcagacttgagtgttaaagacagaagaataggagaatgaaggaaggggaaataaaatatcagaggggaggcaaacaattcagggacacggcaagaaaaaaaaaaaaagccatgcgcgcatcagaaggagaggagctaagctacatgacggtacttgtgggtacttatttttccatagttttaaagcgccgaggatatgtatctcggtgtacccgtgtgtccaccgggcaacgggcaatggtgggggtggccgcggtggttggcctcaggcgtcgaggactacatcataggctgggagatggagggaaaactctgacgctgatcttgtttgcggtggatctcaacgtggccgtgggttatagattgttctgattggtactgggtaggcttggagtcttggtatattgtaagtacatggaggggtagacaggttcgatgctggtggtgtatggggatataggtcaatgttcatagttataggtgggaaatacgaggtacggttatctgcactctacgccgtatgtatgttgtatcctgctttgacagttgacatatgcaggagcacatctcaccgtatgtctatacaaaccttcaagagccctaatgcatatattatattccaatagtaggttttggtaagggtatgcctaaagagataacgaccttaacttaccttctaaattgaactctatgttgtaaattgttgcaaattgctataaacatgcaccgccacatatctcgccacatgctaatcagatccaaatcctcatcctaacaaaaagaagcggggacagaagaaaaggcaaaaaaaagcaagcatacactccaaactaaaaataagaaagaaatactttatttcaacaacaattccttctcctgaactttcgaagagtccatctataccaggtagggagtatatatatacaccgcacaattccatcctgacacctgggcccctttgataccaggtctgacagttacttttataaatcaaccccctttcccattattttttctctcgaggtccgagtccagaacttcccctcatttgatttgctcattgatttgctcatgcatgaccccgttagataagaggagcggtctgcgtgtcgagcgtgtgaatgttcgatgtggacgcacgggacctgcaggactcgtcaattggggtcaggtcagcagacgtgaggcacgaagcacgtttgtgtcatggtatcgattaatggagacgaaaaagagtcggggtgagtccgggatttggatttggggttgttatgtggcgagtttctatggaagaggaggtgaagtgaagcgaaaagaagcgaataatggattttggaattggaaatgaaaatgaaaatgaaaatgaaattgaaattgaaatagaaatcgggcttattagcgatcgtataggagctagatcgcaggctagtaaccgaagtcgggatatcttattccatttgttttcttttgagcttgggatcgaggaggttcattgaaccaagtaaacaagaaataaaggcaatattttgaaaatagaaagtaaaacaaaacaaaaaacacaactttttcggtgatttagaacaaatatcaaatcaaaccaaccacaaagcaaaagaaacctcgtccaatgctaccccaagcatcttccgattaagaaccgaggtcaagtcatgaaagtccatatatcccatgcccgttcgccaaaaatgcaatgattagaaaaacgaaacagatcggaacaacaagggcagcttcacatgcacagaacacatcaccatgcacgtctctgcccagatcgaactgtaaaaaagataagaaaaaaaagcaaggaagtcatcaagaggccaaccacaaagacaaaaacaaaagcaaaagcaaaagcaagagtctcaaaccatccagtccagcccattagcctcttcttctacggggaacacttcacgcgcatactcttccatgtcgcgccagccctgccacagatgtcgagactcgtccgtcacccggagcgagatgacaccgccaggtccttgcatcatgcccgcgccggcgccctttccacccgcgggtccaagacccttcggcgagcccgcggcgggccgtgagaacccgggcnnnnnnnnnnnnnnnnnnnnnnnnnnnnnnnnnnnnnnnnnnnnnnnnnnnnnnnnnnnnnnnnnnnnnnnnnnnnnnnnnnnnnnnnnnnnnnnnnnnnnnnnnnnnnnnnnnnnnnnnnnnnnnnnnnnnnnnnnnnnnnnnnnnnnnnnnnnnnnnnnnnnnnnnnnnnnnnnnnnnnnnnnnnccggggtcgggccgtgagaactcgggctgcgggaagtacggcgcatcgcatcggccaaacagctcctccagcgcctcgagctgttctcgatatcccggcgggatgttgaccttgatctcgatcttgggcacgcggacgtactggcatgggcggtccagggcgcgcgagaacgccgcgcacacctgtaacggggagagggtttcgaaagtgagcgcgatcctaggtggcgggttagctttcgttccttgattctttctcctaggacggtgtctggaaatccgtcccgggtgatgattcccgcactcaccgatgtccgttccatttcttcgggccgtccttgaaaatctgcagcagcgtcggaccaacgtcatgctcggcgtccagccacggcaacgggatttccggatcgaacggcgcacgccactcgaagctcccgtctggcagcagctccatctggaagagcgggtatggcaggctcgtgaagttgttattgtagatgccggcgtagacaaaggtggagggcattccgagctggcggatgtagttctcgacggtgaacttgggcgcccactgcgggacggcgggccagggaccatgcacggaatgatccggcatactgctgtagatgtagtgctggattgtgccggcgcgtttggcggcgtctgccaggtcgtggccgatggcgacctcgtcgccggactgggaggtggtgttgatgaaggcgagctgggcgcctttgaagagctcgtccatcagggcggtgttgccgagcagcgggccttgcaggagcgtcacattgggtagttgttggagttccggggcgatgacgcctttcagggaatgtatttgcgcgcgcacggaataccccacggcggacgcgacacggatcagcgaggccgcttgccggcctgtcgcgttgaccacggcaatggtcttctgcggttgtgtcatccgggttgatcgggggggtggaggaccttggtggggggagtatagagggagaggtatagagaaagaagaaggttatcaaaaaggacaagaggacagaggacagataaaagaagagaaatccggagtaggccttggcgagaagggctttgcgatggtggggtagaagttgggaaagttgtatgtaacaagaatcgtgatcggacctaaattatgcgattggaacagtcaaggtcaggagttctccaaattgtccttctgatctgcaattaataaaataataaaaagaaggaaaagacgcaaaggacgcaaaattgccccaaaaaatggcattcgacttccgaaaacgcggagagccagaaaggataagataagaattctttttctacgcgcaccgtcctctattccctgccacgctgcatatcaaatccctttttccggctctgcgtgctatatccaaatataaccaattcccccccatttgcgcatccccgagggagaaaaaaaaagaaaaaaaaaacccacagtgcggtctcgtccaccggtttttacgtaaatcggcaccacacctgggcattttcggcagcacgggaagatcctgattcgggaacttgagtcggttgggagtgtatgatgtgaggtatgtggtatgtcaagtacttttctctatacctatactatgacactataacatcataacgcaccatacccctatgccgatcgacagaactatacaacatacaacatacaacgtacagcacagcatctatacatcacgccaagccttgaatcgaacccatagcggaaccactcccgagggaaatcaaactagcacgtagactaaatcacgcaggtgacttcatagcaccgttcatcgcgaaggacttcctgttccactgtctgccagggacagcctcacgtggtctttatcgtatatctggatgtgggctagggcttgtccaatggcgttggggtcttggcacaggttgacgtgctacactcatgtccgacttgccattccacccgatacgtccaggtaacaaggtacttacggagtgccacggagtactacggagtacggagtaccttttggcacaatagctgggagattacgtctgaatttacgtctgaatttacgagcctgatatgtatcttccctgcctgaacatcacatcattccctgcggcatgagactattttcgagatccatgaggcaatcaatttagtacaacatactccatactctatattatcttgcacgatgtgggtataaaaacacgcaaaagggggaaaaagcaaaaaaacatgcagacagccccctccataaaagagaacccagttggagtaaccccccgactagaacacttctatacaatctagaacattcagctatatccaccttagcagttagcaggcacacccctgtacggagcacggagcacggagtactaacgacactaacagcaaaccccagaaaaccgaaaatgaaaaggagagaaaaaaaaaatagggagagtccttatcttccccacttagtggcttctatccccggctacggcaggggacgatctccgcggatgaaattccgtattctagtctggtgatggtgccacagctaaaagaaggcaatagaagtaggacagggggggttttttcttctttgcgattctggcgtgatcggaatggagtgcgactataacaaaatggtgtcagaataagcccgaggttactctatggtgttctattattctatacacaatgtcataccctatattatctattctataccacgatgtcatcatcgccgacgcaaagcgcaggcattcaactaccaaattgaccggttgaagagggaaaattcccacaaaagaagacgcacctgcaggcttaccggaggccaatgccccttaaaaaaaagagagacatcatatcaaccgaagtataggtaagccatcccacataaagcaagggagcatacgacacaacagtaccccaatcccaaccccaacccctgaacctagcctgaacctagcctgaacctaccctatgacgaaatcctaacctaaggcgccgacccaggaatcatccgattcttaccagcatcccactcccactcctcctccatctcccgctggctgatctctttcggcccaaccccagccatgccccagacaaacggccggtgacgcgccatgagctcggcggctggtcgctcgtccgaatgcaggtgcgcgccggatttgcgcaggaggagcgtgtgctccgagaggcccgcgctcgcggccaggaagagcggggtgtggccggcgcgattgcggaggtgcaccgagccgccttgcgataggaggaggtgcaggattttgattgacggggatgtggctgctaggtgctgcgttgggttagtgtcgagataaggatacggggcgagggagataagggagggggaaacggtgagacgcttacgatgggcgtgttgccggaatagtcggcgtcgttcaggagccagtggtgttctctcttggtaatggcttggaccttctctaggtcgccctgggcaatggcgtatcccagcgatgtgagtgtctggatgcggtcggagagttcgccgtccgggtgtcggaagataggtaatgttgactcggtgagctcgccgcggatggatactgacatgtttttggcgacggattccggggtggattctggcagcgcgaggagatacgcgagcttcgtcaatgcgccctcggttgtcatgtcgaggccggctacgacgcctgctcgagagagactcatgcctgtggcgtagactggactgacgctgcccgtaagaccttaagatatgtcagtcatcctgattggcgtgaagcgttgggcacaactcacattgcgtgatattcacaataacaataccccgctggatagcactagccaagacgttgatcatagcgttatcctgccccgagggcgcattgcccgcgccaaaagtctccagaatcagcccgcgcaagccatccagcttgagcaccgcatccaccatctccggcttgataccagggaagatccgcagacaagcaacatgcgtagtatccagattcgtgcgaatactaaacggctccaaactcgtaggccgatgcaccatatcccagttcacattagtccgcatagaattcgtaaccgccacgggggcacaattcggcgaatcaaacgcagcgaaatcactcgccgcaaccttcgtcgtccgattcccgcggaacaaccgattattaaaatacaaacacacctcggggatcataaaatggcccgcgacaaccaacgacccgagcaggttatccgtcgcgtcattctgcagctcgagcatcggcgcctgcgacccagtaagcacaaccggcttcccaagattctgcagcatgaagctgagcgccgagcacgtgtacgccagactgtccgtgccatgcagcacaacgaacccgtcgaagagcttgtaattgcgctcgatcgcctcggcgatttgagtccagcccttcgcgtcgatcgagctgctgtcgagcagttcctcgaactcgaagactgtgtaccgcacctggcgcccgtaggctgtcatcggtgtgcgcaggcttgggcgtgctttgagttcgtgcgcggcgttcgcgactacgttcattgttgtgctggcggagccgtcgttgaaggtcggcactcgcgccatgcatttttcttggaacccccgtgctgggatgaagccgcctggtgagggttgcatgcagattgtcccgccggtcatgatgattaggacgcgcgactcgtgggaggtctcttcggctttggcggggtccagcgttggtgtgagcgtcattttgatggtttctgtgctgagctgagggttcaggctggtagatatcatggcgaggtcagtttctgattcttgtggtttgtatcgcttggcccgtgacctgcgattgcggtcgtaattttaacgataatccaaggtcaattgatatgaatcaaggcattgatccgttcattcgccgtctgcagtgcgccacgatcaggtgaatagaattttcattaatcggagacaacgttgaaatgaaagttaaaacgttaaagtcactcaaccgcgtagatcaacgattgactcttttggcgaagaagtgaccccaattgaaccccaactcgaattacgtacagcgattttcattggtcggttctagtttaagactttgtccccactctcagcgatctcggagtacatacgtattggccgagtctgatgatttagatattctatgtatcttgaaggtctttagaataagaaacaaagcagcactagtccatgggtgatcgcggataggttaacggtacgaactcaaattatgtagttcaacgctttactctacgaatcctgagtggaatatgaagacaatgactccgtagtggagctatagacgtcattcggaagcatcgagacaagcaacgcaaagcacattggctatttccctttccacgacttctctctgtttcaaccgttttgtgtattctattgccgttaccatttgcgtcggtaatgcaaatccacgatcacagggcctagctggcataagaagtactgtaccggatagtttactatgaggtgaggacaaaaagtgtgaaataatcgatcatctcagaactagacatatgcccccattatttcccttttatcatttcctcctccgtttctctactctccacttctctcaaaaagttcgcctcgttccaaatcacccggggagtttttgctgaaacaagatgtgagcaaaatttccgtagcttacaaagcccggcgaaatcggatttcgtcttcaatgacaccatccacgaatttggtattaaacaaagcataaagcgagagtccttcattgcctcgatttttccaagttgcggttcacaatcaaaagtggtctcgtcgtcgcggaagactgcccaaactgactcatagtagcttaaaagcctccctcgatgaatgtgccagcaaaggtcagattttgggcacacggcttctagaaaagggcaaatggaattcaacgtcggcatcgaaaagcctggaatagttagtaacaatatataatgtgggaaaggatcaataacaactgaccatctgggcgatgggcgatgggggattttcagcatgattaactctaacaattcctcctctttatcgagagactgccagagtgcgtcatcaacagaagttccaggatttgattctataaagtaagaacggatatctcgagaggcggctctagacgcttgttagccctggtataagatatctagtcttctttcttaccgatcctggatatcctttaggacacattcaagttcaccatttgataaacgacttaaaggccgaggtcttcggcgatttacccgaaaaggctgtctttcagagaacgtgtacgacgcggagaagtcatatagaactgtatcgtaaatgtcatcgggaagtcgaaaatgtatatctccatgggttatcccaatccgatgcagagcatctaggcgacgaagtcggtctttcagtaaagaataataccactcctgttcaaatggacttagagacatcatctcaggagtagtccaaggcgtttgtgtaaggatcgtcgcgaagcttttagatagttggtcgatatcttcactaagaacacttcgagagcacaattccggtcttaatgcctctagcacaaccgctcgctcgtggcaatatccaaaggagaatcgagattttgacatattgataaccaccgcatggaattgtgggaaatatattctttcacgggtggaacagaataggtcaatatggttcgagggagttgctccgccgccaattcgtacgaattaaccggcaagattccaaagttttcgatgaacacgtcgagaacttgatttccaatctccgctctgaaactgagcgttcacggtgaagacgtgaaccgtttccgccccgaaagatggctgggtccagagtccagagctagatggtgttggctgggtgtttatgcctttccacggagggccaaggatatgtctaggcagtaagtgatttagggtatgagagcagtacgtagaacttacgctgactgaattggcggaggaatttgcactgacggaagcttcgcatgcaatcatacgaatcattcagacattccccgagcttagattaccatctgatacacctagtgttccacctggtgaggaaaagcaagctttgacgattgtggtgatgagtgcggaaggatgtaaggttttgttggactgaaacatgtacattagacgataggttcatgttagccagatttacaactagaatatgaggacctctgagtgcaaacgcatacactgagctaaaatatttgtattaaggctatactccaccgaggcaaaattcgctacccggaactttctccgctattctcgtaggggacccaggggcaccccattcatgggcttggccaatctgggcgttggttcaacacgaatattcgttcagcatggcatcggaaacattggcaatgtccgatgcatcctctagcggttcgcgagagtaacggattgcccgtccacactggtcgaaccatagcgcaagaacagttcctgcgtcgaagccttcggaagcaagggttattgcatcaacgatatggcgggcagtggaatagtttagttggatacgtcttaaatgaagactacgaggaagaaatccatagcatctcacatatatagggcagtattctggaacaattaagcctaatagtaagcgtgatatagcctgaaatactccgtagtcattcgctagtctcaccccggattaaactgcgacaaatcctcctccaaaagccccatcatgtactgattcccccagaaccaattccccaattgcgcagcagtccccgaatcctgtccctgcacttgagatggatcgagcgccgagaaaccacccccgttctgctcggatatatccgccgagctgacatgcataccgggattatctgtctggaaatatccctgagagtttcccatctggaaggcaccactgtttgggggattcatagggtttgtaggcgctagtccgagagcactgaggtacacatcgaattcctgaccgacctcaatgagatcctggtcttggtctgccgctgtctgggtccgcgtgttagcttcgtagtaaaggcgggcgacggtgccgagcactgagcatagggtgtgtaatcggtcgacggattgagagaaggtgcttagcggttggagggaggcgatgaactcttcgagtcgggcgaggtcgtcgccgttggactttgttattatgttgcagaatatcacgatgaaggggacgaagggggataggaggatgcccctatattagttttgtgagaatttggtctgagagtgtatagccattgcagagacagcgctggttgggatcatgagtgcttaccagtgcatgtaggagattttcatgaaatcgtctgtttcgttgagcgctgcaacgcactgtcggtggatttccagggcttcccgggctgtctcgatgcattccggtatgaaggtggcaacagaccccggatctgtggatgctggaattgctcggtagatcaaagtcatgatagccagccgacttactttgtcagttgcaaggtacatgaggtcgatctcggatattttaagatcggaggccatgaatttctacatgtttcacgttagcaactcgactcaatcaaatccacaaatagcaggaaggtatacctcaaacggctccatgaccttcgactgcatctcagcggctaatctatgtgcatgtgtgactcgttcactttctggtttctgcagcgcctctgggctgtacaaatattggtaaacctcactttggatgattgccgacctagtccaccatatacagacaggcccccatggataaggaacatctgcgctctcatcgagcggcggtaggctgatgtcgtagttctgaatggacgacgcacgtcctagacgcagggacatcatattcaaaattgtgtagaccgaccagaatagatgttgcttttggcgttggactgatatgggatcgtgctccattgaagtaatgcgatgatatcccagtgtctggcacagattcatggccgttgatgctagcgtccaggcaactgatggcttagaaatctcgagtgcatgcatagcctgtattggtaagtaaggagtctacatgggttatatccgaaaaggacaaaatggaaagggtgactaacgcctagggccaacgccatgatcgactcatggcttgcaggcatcaggatgttcaaattggcaagcgctgtctctaggttgtcgcgacacatctcaatgcagtgccggtgctcctctcgcgaactggcgtctctctccatgccgccatattcgtagagagcgctgtacaaacaaaagttggttacaacaaatgccgcatcggagtaatcgtctatgcagaagtagacttcacggcatttttcagtgaaatatttcacactgagaaaggggacatagccaccaaagaaggccggtggtgtttctggatgagtaagaataggaagctggagacgtgtctttggaataaaccgcaccttgaacttttctcaatatgtctagaaccaatggtagaggcggcatctccagatcacggatgtcgcgtttcacacctaacctcgcattcttagtaggaagttgactcccctgcgagtctgcttctcgccgttggttttggattccaacaagctgcttcagcgacgagagagccgcgctgatcttcggactggacaaaacctgcggcgagcttttggacacggcagattcaagaaacgcgctagcgtaggccccatgggcagtcagcgatgagctgccctcaaacccagagctgtggtcatgctgctcgatagtaggattcgctagatacagaggacccttaggctttgccgggttcgatgtagcgaatgacggctgcgaaggggttgacttctgaggcgaaggtgcgaaatgagactcgcgcgagtttagccctgtggagccttgtagttgagatgtattttttgctagctgttgaagagtactttcaatgcttgccaggcgttcctcgatcaaatcaatctttttctcactgtggtcgagtcaatggttgtcctatgataggagaaaatgctcatactattgatttgagattaaaacccgccgtcggggctctggtggcttctggcctctgccagtagatcggcatacaatgctggagctgcgacagttggaacatggcgtgcgcttatcgcatcggatctgtgacggcgtgagatcgaatcatgatatcgtgccactagagttgcagctgcatacctttcgcagacggcattgatcacactgcatgcatcattaatatttgattagccaaagccgtatctttcctttctttttctaagcttgcaactgcttagttgtggagcaacacctaccgcacgtcggaccagcgcgcttggcacatcctgtccctcatgatcggattcctcgggctccatgaattttcagacactgcgtatctagccttgaagtgtaacatagaaattgctagaattagagacgaatgaagcttcaaattgcgagcccgggcttggttgccttggccaccggtacgatcacgtggtaggacttttattgagatgcgataccagagacatatatgaatatattaaattttgaggttaatcggcagatatgagcgaacataatatgtgatatcttcatttaacgtgaccagtcatgaacgagagtgacccagcaagcgccgtgcctgttctattactttaatgggcacagcgcgtccagcacacatgaaccaaagtgtataatcaatctatcttgcaaagtgtggtgggatataagcgcgaaaacaacctcggtgtccaatgcagatctatttcttgggaggcgcagggggccaccacgcgccatcgctcagccagactcctgtcggactgtaggatccagcctcggaccctctcaaaaacgcgaatcggaaaaataggtcttctggttcatcatcagggtcactatcagccaaaagaaccgatctaggttcaatgttagtgtccaaatcacgattgactagacgaggatttgtttgtagctccaggccatcatggccatggcgatgccaggtgaattccccgcgcttgtcttcgtcgagatagccgcgccagcgctctacatcattgagaagaagggagacgccgtcgaccgctaggtcggccatgcgatcatgttcccacagagagaatgtgatgttaccattgccgcgataagtgtgattcgaatccaactctggaagggagacattcacggatgtggccgtgatattaggataggtagcaccccaccagccatggattccatctccaagtggcgcttgctctcctagggctgccggagtctcgataattgaggcgaagccccaccgcgcaactccattgatgaaaagacccagcagcagaccctggtagacaagcgagggccgggtgggaaaggcggtgccgggcatgaggagaatggcgaggatataatggtgaattcgaaggcgaagcccaggaaggggaagcaaaatcaagatgatgacacccatggtaccgtatatcttcaaataccgtgggagcagacctccctggcgaatttgccacgcctggcttaggataatcgaaatcacaattgggatgacgagagccaatgccaactttgcccccggttgtttctgaatgtccattggagttagacgctgcaatggaatcaatcgcgcaaaggtatagttgttcagggctccagtgaacagtggaggtaggaaaaggaacaactttgacaactggtagataggcgaggatatcggctgcaacagcggcgcagcacagaacttgtaaagtacgtagacaacaaacgacgctggcagcagtcgtgacagaagactggagacaaggtcggccaagaaaggatacgagggcggatctccaacaagtcccgtatggcagaacaccatgaagaatgtactgaaaaacagcacaggcggtgaagtacagaagagccacaggatgccaactgctgcagcagtgattccaagaagcgtccagcgtggatcggaggggcagctagcttgtggcgaggatagctggagaaagctgaaagccttcgggaatgtcgatgggaacccggcagagagaataccgtgttgcttgactgatgggaaagagtgcgctgcgccttcaagcttgacgacaccgcatccgccatcgttggagattgcaccgacatggattgctgcctggcagataaagctatccgcacggtaaagtgccgggtcggagccatccggcccaggccctccaatgactaggccttggtagttgtacgtattatttcccacaacgtaaggctccagtaatttggtatcacggcagttcgcaggacaccggaagggaatagttgatgaagaaaatggacggcagtcgtttccgttaataccacatccattgtcgacctccctaagcaatcaaatacatgttagcggattttatacctagatggcgcttccatttccgcacgtaccagaagttcgtcgagcaggacagcgtctgaggccgaccgtaaccttcgatataaccggaagaacgcgagtgtaataaaaccaaaaaccaaggcaagaaccaagataaatagagcagcaataagagtaaagtcttaaatttgcgctttgggaagaaatggtcaaggtattggactggaagttcctggaatcgcggaaacagaggtttcaacagaagcatatgcgggggatcgggacccttgacccaattgacggtggcgcgaccgacctttcggagcggtagcggcacccatccccagcgaaacgacttggatgattcttgcaaccagacgggaagagtgctgcctgcctcaacgtccggcggcggcaggtcttcggaagcttcgggatcgttcagacgctcgtcatcctcaagcagcggaggaacatatagcctggcggcttgctctcggccctctccaaacatggcgaagcgttggcttggagagtgtggtgtatttgaagaaactagaatgaacgcaacgagcgattgggtataaggttgccagtggctgaagggcgctagcggtgcgataggcagtggggatctccgttaattgatatgtaaggcggaatatcaccagggacgtggccctgaagcgaatagagcgagctaaccgtgttagacctataacatgaagagataggcgatataaatacaaaaaagacaaaggtatgggaagaaggacagacgagatccaagatgagatctggggaagagacagcgaaggcggatcccatcaggcggccaaggcagccaggcagccaatcaggtcgacccgtgtgatggtgtccacaggtggcaacacgatctctccgccgacaacaatctatcttggggtgatcttcagttcggagaaatttgcaaaatattgcactaatgcagggaaaatcttcggatgtgatctgagcttttgaaactatatcgtcgttccaccgtgctgtccgtcctacactgtgtgacaacaaggccagggatcacagccctggtactgaacgagggaaaagacatgattggttgagttcctagggctttctgagaaattgaagacctcggttccatctgaactggtacacttgcgtatacgggctactactcttgggcagtatccacgtatccactccatcgtcgccattctgacgttgccactgccaaaatagtatccatgggaacaccacgtggaagccacctggatgtacaagcttactcgcgtgggaagagcctgactctgacggtagcagatagaaccggcagaagaaatatggtacatatagctacttatggaagtaggtaggtattccctggcttttcccttcttcttgttcttttctttttcttttcttggttttttgtcttgttgttaacttatcttgttgtcttgtcgacttggcgataatttggtaccttgttgaggagcaaggattttgttaatacgccgcaagggtatccaggtgtcaatatggagaagcccttcgaatggtggtcggttgagcgttgatgtcagaaggtggtgtaagtgtttattttccagagtcagggtcttgattccctttgttgtattgctccaagttgtaaacagtaaagtcgggtttgaatcttgatgcacatttcatatcttgcagcagcctcgttatgctcatttccgtgcatttcagatatttcagttgccagtggttgagagtataagaggaagtcggatttgcgtgaggtcatgatgtcaaagtagcaaagcaaagcaagattgaagagactgaaaagacacacaagtcatgcgaggtatgttaggaatgccctgcttggttggaaagtacccttaagctcaatgagaagagcaagaaggccttgtgatgagagtcacatggtgacagcgggttggcaatgtatgaggctctgcatgtataaaactctagctaactgctatagacattgaagactgtgagcccatatatctaaaacagtcagccccatgaggtgacaatggtgaaggtcgattggaaatatagatggaaggagtaagggtgtaaaaggatactcacgcccttggattgacgccaggcccaaaagcgtctggaggttcaacacactagatagataaatgataatcattttagtggactcaattccatggtgttttagttgagctatatggcatatgccaccactcggtacggagtacggggtagtgaactgtgatttacgttgaaatatcaagcaaagccaagaaaaactatcaccgagcccaggattcgaacctagatcgcctggggtcctaatacggaaaaagaacgccaagaagtggcagtccatagttatcgaaataggtgcctgaatgcctgaattaactgtggggtcagccatggactctcacaaataattaaaacctcaccccgcacgagcctcaagctctgcaaccggcatgatgcctctagtttccgaaaacgaagagcttgccgaagaaatcgaagccgtaaacgccatctacgatcccggaacagtaaccgtaacgcgcacgaccccggcaaatgcgacaaccaacacacttgacctagggagtcccgcgcactccaataacaacatctataccacagtggtcaccctccaaatcccagaacaaccccacctgtcctttatcctcggcttcgaagcctcatacccagactcccgacccgccgtactgggaacagcatcaacagccgcacgcggggaaggcaagatcgccatcgatgtattggaggagatcgtacaacggacctggcaggccggcgctgtgtgtctattcgatgtaatcagcgaagccgtcgatatattcccggaattgagtatcggacaggacgatgtcggggactcgtctactcagacaccaactgtcgacgcgtcgtcgaccgccacagaggcctttggagctctgtccctgcgcgacgccttcggcctcgatgccccgcccgaatggatcctctcggatgtggtctccgagaagaaatcggtgttcgtgggccgtgtagcccgtgttactagtctagcgcaggcgcaggcttttcttgatcatcttacggctacggatcggaaggttgcggccgcgtcgcataatattagtgcttggcgtattcggcacaggaaggatggggatggcgagggtggggagactgttgttcaggattatgatgatgatggggagactgctgctggggcccggttgttacatgttatgcagttgatggatgtgtggaatgtcgtggttgttgtttcgcgatggtatggaggcattcaacttggtccggcgcggttccggctcattaatgatgctggtcgtgatgctttggttaagggtgggtttactaaggagcgagaggaggctgcggctgcggagaaaggaaagaagaagggcaagaaatgaggggactggtgatctccctggtgatttttgatgctctggactccggagacccccaaattgaattcatttatatggggattctggcccgcctaaggcggacatgatgaaacacccgggtccgcatagccagggtgcttgatgcaacctcgaacaggcagcaaccgcactgcaactgcggatacaactttcctccttggaaagtgtctaagactttatgtcttatcctaagactgggatttacgacaatggcaaattagtggtgcgtggcccgtcatgcgacactgtctacgaagtactgacaacaggtaatgctgacagatgatccaagacacagtctagcatacgatgaaagattttgccaactggatccagacaaagtcaggccagtgcaatgagccattcagggccacaacctttgatgtctgttccgggaaaagcagcaggcgtagaacgaaccaatcacgagccgtaatatcattgagatttttgcatccaccactactacatacatagcaactttcgtccgaagtgctggctagcggttctttgcctaggaaatcgccttctcatggtgcttgccggactgacatagttgatagttgtttcgcccgatgctccgcgattcctcacgttattaacccttcatcccgagacgctttgtatgtattcatgagatcttcacatcttccatcgttgctgcaggctgcaatctggtctcacgcaagaccagccatgccgcgacaaaactgggacttttcgcctgaggctggctgtgagtatggaaagctgcgcctctcgcataccattgctataaaagattgtagatatcctaaacgggtaaaactgcttacaacagtgggtataattcaaccggccggagccgggtggtggaccctgactatgttggaagagcaattttaagcgattcgcaaacgagaaatccactgccatgaagccaaggaaggcttggccaaagtcaaccagcggagccgaaggatcgacagaagcattcaggaaacagcaacgaggccatttccatgcaactgccagttagttagcggtgatgactaccctctgggcactgtgcctagatagcgctgcaatcccgctggcaacaaaacacgttgccaagccttggcaggggcggccccgcttctaacggggaactcttgggccctgtgctgagatttcccaccttataatattgtatgccggcaaggattgagggtctcacatgttctttcattcatgccagtatgtgattgactctgtgtactagcgcatagcccctatttttgtgtgtcttgttttcgattaccaaattcaatccttctccgcatcgtctagaagaatccacgggttgtcccgcacccttgcgcgtgctcatgatctcagatgggtaaactggacccgtgcggacccctgctttgcatacgagtttttcggtgccctccgcaacgagagtcggtggctagtgagctgggtcctgacctggcagagttgcgaagaaaacatcctctcggcgctgatatggtcagcaacatgtccacttcggcaacctggttcactattcgtaattctgcccccaaggtggatctcgttgctgctacagccaacaagacatgtccagggcaatatggcgtggcaatcaatatgactgacaaaactgtggaggtcccacgtgggtcaattggtctggcggtgactacaccaatgacacatgcgcagtggtggtgtccacaccgaatcccacgctggatccttgtcgcgtcgaaattgacaagactattgtcgcaagtatagaggcctctttgaaaactcgcttatgcgccgattgcctaaggatgacaagaatgccgcgcaacaaatggctgtggctggcgtatcctgcgtgctggctgcatttggggccttagttttccttcttccgtgaccatattcctgcgttagtcctttgatacccgatgtcctactcttgctacaaggctgtccctttcagccttggccgtagcaggctcctaatggaaaagtagatgccagacatctcgtagtacaagatcggtttggctgccgggttgacattctcttcgcctctaactctcgcgtagcaactgaatcgagcttgcgagttggaagccacgcccataattaggcgctcgcgaacgacttggtcaatgtgacacgtcggtagcacaccgtgtttggcaacatcgatatcaggtctttagtagccacgtaggtagaacatgaaacctccttcacatgtaaatcggcatacgaacggttagttccgggtttcatgcccgatttcaaggatataccgactgtaagcgcttaaacagaaatacaacctcacgggaaaagagccgaaagtgatatgcggatggtttgattgcgatagatcagaggtttaactagttaattaattagaaatagttaagaattactaataagaattaaggagtcacatttaaggaatagtggggtttgcaatatattaggtcaacatatatcacgggaataccgaggtagacgataagattaacagacaagctacaacgctgaaatgaagctcaaccctttaggatttcatttcctagatcatgaaagtccatatattctacgctataggctaggcagccagtattgtttgaaattttagggagcgctaactcggcgatttccactggcttctatattggttctacggagtagccgagttgagactaagtgcatttggtggagctgcgtgatcctacttttaactgctccgtaatacttttaaaattagtgagatctctggagatcttgccaagattgacacattcacattgctaaactaaaggggaaagacaaagttccggtgttagatagattggaaggctgaagagacgatggcttgggttacattgtcccactgcgtcattaagggcttgaagagcactactccggtgaagatgaaacacacccgtcaacgttggcaacagaagaacagcgccaatagggagttcatttgccagcggttttgatggtgcgacgaatccaggggcttgtctgtgcggtggttggctcttctccagccgcccggcttagtcccagcgggtatcagcgagaagtctctctcgtcttcctactggtcgtctttttagttttcgactaggaatcagctttgcactgcaacctctgaacttcagtggacaaaatgaggggggaaataggagtctgaaacatccaccccttggccttccccactatctccgtgatgtctctgcactttcagacgtgtcgggttagccactcagaggctgggattggggatcttcgagaggcttgcagggcccgagagacccatgtctgtatatataattgacgccaacgccatccctctttttttcctttgcctttacctccattctcttcttacttcgatcaattcggcattcaggctagacctgtgtcactttccttctttccatcgatttttgcctgtggcaaaacatcatacattcctttttgaagcccatctttgagacaatacaaagacgccctattgttcatcaacaaagaacccgggaaacacttccgatacattgaatcagtgtgtttgtttcattcactctgatacaaaggtattgtctctcctgcctttgtttcatcgttgcctcagatctatatacgtctgatctattgtgggaaatctatcatctattgaaggggacatctatatgccttgcctacaatagacaataggcatagacctatcaatgagacactgtcgatatatatacccccaagcccatcatgttctctgttcaagtctctcattccatgctaacatcctactacaagatccattcctttctgacatctgattccattcgtctggcacgaatcgatcccatttgcaacatttgtctatccaaaatctcaaaccccaaaaatttcaatcagccaagatgtttatcacctccaactacatcgctgccctgatgggcgcttccatggtcaacgcccacatgatcatgagcgtccccgtcccttatagcaaggacagtctcaacaactcgcctctggcagcagatggcagtgacttcccatgcaagcttcgcgataacgccttcgaggctcccgagaccgagaccatcatcgcaatcggcgagtcgcaccctctgtccttcatcggcagcgccacccacggcggtggttcctgccagatcagtctgaccaccgacctgcaaccctccaagacctccgagtggaaagtcatcaagtccttcgagggtggctgccctgccaatgttgatggcaacatgtctggcggcgccgacgtcgtcgatccctactctttcaacttcaccattcccgacggaatctccgctggcaaatacactctcgcctggacctggttcaaccgcatcggtaaccgcgagatgtacatgaactgcgccccaatcactgtctcgggtggctcctccaagcgctcccctgaggaattcgagaaacgcgctgctagtttcccgcccatgttcgtcgcaaacgtcaatggctgcaccaccccggagagtgtcgatatccgcttcccccagccaggtgacgatatcgagtatgacggtgaacccgctaaccttgccgcggagggctccgaggcttgcaccggtaccgctaccttcggcggctccgctatcactgcttcttcgagctcctctagctctggctcggaatctggctccagctcatccgtcgcttcctccagctctacttccgcccccgcagagagcgcctccaccgcagccaccacggtatccgccgccccagtcccagaagctacttcttcgagtgcacccgttgaccccgagcccgtggcctcctcaacaactgccgcagctcccgcgacatcctcttcgtcctctggatccacctccggtgccctgacgggtagctgcagtaccgagggtgagtggaactgcatttcaggcacctccttccagcgctgtgcttctggcacctggtccgctgctcagcagatggcgaccggcacggcttgcaacgctggtcagagcgaggagcttgttatcagcgctagtaagaaggcgcgtcatctctccagcatgcgcttccgtaatcgcgcgttcggtgttcaccatgcccactctatctaatctagttagatatggaaacagtccgctagtttcggatacacttcgtccccatcacgaatggtttttttgattcttgtctcttattgctctttcatttcttctgggctggtcctttcgcttttcggtgcattgtatgttcctttcttcctgtacattaagagatgagaccaggaaaataggacatctcaaaggtttcgacataaagatatccttgtacactgtgttgatcgatgttgtagcatatgtaaaagtctagggtttgtattgtcagcagtctgtagagcttattgctcaaataatagtgttgtttgtcaatgtccattgggaagcttgatgatagacaaagtcagctgcagaaataccactgcccacgagtttagtgggtcttgacaagtttctagatgtagaatcaaattgtagagacagacagtcacatcttcagcatgtttgcctctactttgagtaacggaacttgcttgacttcaatgttgaggatcgcacctgccagatatggatagacccacttgtggatccacgtgatagctcagattagctaattgctatatatcaacgctagtccacaaatggcaggaagggcttagggtttgccgccccaccgcattttctcactaagcgaaaaaatccacaccgagttgtgaagccccccgactcagacagattggatcttcaacctcacctcgacaccgaccagcaacaatggcctctcgcccgactgtctcgatcgccacggctgcgggaaagccctccggggcctcccacccccttcccactgtgttctctgctcctatccgcccggatattgtccagtatggctcgccaaaatcttgaagcatttacaaatcaatggaggggaagtgctgaccgtcgctctacaggcatgttcacactggtatggccaagaacaagcgccagccctacgccgtgagcgagaaggctggtgaacagacctccgctgagtcctggggtaccggtacgttattggcacatttttcgagattggaaggattggatcgaaatttgcgaaaatttcgcgatcgtcaaattcttctctattgagagcaataactgacagaattgcttttcatcgaataggtcgtgctgttgcccgtatcccccgtgtctccggtggtggtactcaccgtgccggtcaggctgccttcggtaaccagtgccgttccggtcgtatgttcgcccctaccaaggtctggcgcaagtggcaccagaaggtcaacgttggccagcggtatgtggaatccaattcgacgaatcgaacgcctagagaatggaggaactaatgaacccgcgcctacagtcgtttcgctaccgcctccgctctggctgcttctgcttcccccgctctgctcttcgcccgcggtcaccgtgtcgccaacgtccccgaggttcccctcgtcgttgagtccaaggctgttgagtccctgaacaagaccaaggccgccatcgccctcctccaggctgtcggtgccggacccgatctcgtcaaggtccagaagtcccgcaagatgcgcgccggtaagggtaagctccgtaaccgtcgcttccgccagcgccgcggacccctcgttgtctacaaccccgagaccgacggcaaggacctcgtcaaggccttccgcaacatccccggtgtcgagacctcgcccgtcttctccctcaacctcctccagctcgcccccggtggccacctcggtcgcttcgtcatctggacctcctcggccttccaggctctcgaccaggtctacggcaccaccaccagcccctcggctctcaagcgggattacctcctgccctccaacctggtggctaacgctgacctgacccgcctcatcaactcctccgaaattcagtccgttctgaaggcccccaagggcgaggcccgcaccaagcgtgtcaacgtccagaagaagaacccccttcgcaacaagcaggtcatgctccgcctcaacccctacgccgctgcctactccaagcagaagcttggacagcagtccgtcgatggtggcaagcctactgctcctgccgcggctttcctcaacactctccacgaggattaagcgggtctttatttgcccctgctcttttctttgttaactgtgtttcgttggcaaaaccgtagtcagcaaaaatgaatcaatgccttttttgcaatacccatgggtctatttggagtagtaatgtgatcggttttccgtgttcttctaagaccctcgaattttttgtatcgtgcatggtaagtgtagatgtaatatggtcgaggttctgtctaagatcatcgtttatatggaggtgaatgtcaacccttccgctgattacaacctgactctgatcgagcatgatgactgcctttttcaaagctcaatatgaagaactagatctcgttcttttccacggtcagtataaccttactgactagcagccagacacttctcctttcctctccttttcaattacttccagcttctatccagtgaaacagattacttgtctcttgtagattaccggtcgctcgttcgacatccttatatcgtgaccggcaactcacttggctatccttggtggtttgcaacgtactcgccatgaattcaggtgtctagtttcatacgaaacaacagacgagaggcccattatttctttgtcgtagaaccaattaacacctcttaaataagaggaaatttcatatatatctgtacattgacatgactattttccattattgtcagaaaatatgattattggaataaattattttcaacatctaagtatatagacggaggtgcatataaaagtcaatacgtccagagtaaccatggatagagatgcggctccttttccgcaaaacttcttaaagtacaattataccgagggattcagaatatctcaattgagactggacaaatactcgaacataattgacaatgtctcaacccacagcgggaaatatcacatgccaacaagtttccttacagcccacttagtaccggtataaagtataaacccgatgcaagcacggaaactatcccaattaattcatgcagataagccggcaagtcaagtgaaacatacatcatgacttgctgagttagcgcgagtggttcgataaaaagcagcttgtaagatattgattggtgtcgtggttattgagtttcggcatttgcagaggatagatagcaatccaaagaaaaagccagcattactgaaacacgggatataaataagcattccaatgtcttatttcggcagcttcacatgtcactgcttgtaatctaattgacttttcgtctgccccgttggttccttggaaatagataggttttaggcatatatacggagttccgtatagcgccgggacgtgaacaatggtataaagaataaagtttgtgttcccttctatgcacgtttctatcattttcggagttgcgtgcaccttgaaagttggtcctgcaacaaatatctacgaaccctctactccgtacggagtacaacttacggagtacaacaacaacatactccgcagggcacggatcaagctcgggaaatcccaatgtcaatgccgatgatcacctaagcggaatacctttttggatgtcgggcacggagatcagggacgtgccggggtagatgccaaggaaaccttcaggccccagggtccgcaggtgatacataactagtcgcttgcgagtccgggatcttacgtcagttaaagagctttttttagtcctgcatgttgatgctattgtttttactgtttgagagatcactatgtttaaggctgtatgttgatagttagagggtctgaagtctctgctgtatacggagtatatatacagcctttcaggaatccatggatacatacaacatagttatgcaagagtctgggatagacatgtattctagtaaagccgcccaatcccctcagtcaaatatgcaacactaatcaggaacatatagccgagagatcctgaacgccccaagccgtgcgatcggagggaaaaatctccgatccgaagaaacaaagagaaaaaatatataaaaatataaaaaagaaacgaaacgaaaacgtgtaaagagcgctctcggtaagatcaaccgacggataacctgcacgagcaaggagaaaaatctaccttgtgggtaaataaacgcccgggtctcgtgctggtctctattcgcagatcacaaagcgggtgcttgtctaagtataggcatgtctcacttgagcagctaacacaaatcagttcaggggtgcagagcgtgttggcgctatcaagagtcaatcagacactagctccgtgcaaaacatgttgcagtagtaatgttgcaatacattagtgtctaggaggaatgaacacggtaggtttatactcctccgtatagaattgagaagtgtttctaattatttagcttatttctttgttccgacggcaaactccgtagaactgttcacaaagtaactagaatacataactagctgaataaaccgaataaactcagttacttcatgtggatcattgtacaggttgtctctagtcgctccctatacaaccgatttcattggacttctacgcggattaatcctccgcccaacccaaaaatttggagtctcggtatttgctcggagaaactagatgccgtaaaaggaggctactccgtataggaagctgacatctctaaactgccgagtcttagaggattaacggcggaatcccgatgtcccgggtaactcgcgtcatttcacgggcctttcctagaacagaaaacgcacactccaggggctgagaccgtaccagacgatcccgaaggcttgcagatctgatcgccagaaattgagactgacaacgtattacgtggtcaattccagagttgcatcgccgttggactaggatgtcgagtggacacttggaagactagggttccctgttgaataaagaatgtggtaattgtacgggcatttcctataaaacactacataatctgctcgtaagaaaaaaatctgcatagatacccatcctgggtagttcgctccgaagaattagaatcctgagccacaaaataacctctttaactatagagtactccgtatattagttccaatttggaaacttcgggtgcacaacagccactccacttgcggacctgcttgcggaccaagtcgattctcaccatatccaaacgtaagataagccctgcggccccgacactgggaggagattttcccgtctaggcatcgaatcgcccaagccaccatccgaccgaagcccaagggacccactgtgagggtattcgcggtattatccgagtccaagcttactgcgctttttccccttataatttagtccctgctctgcaaattctaggtttgggcgtatataaatcttaccgagtatacatacataccgatgtgcttctttgtctacctgggtggatgcccgtatccatacccttgtgcatgtatcttgcacatgctggttccaaaccccgaaattctcccttgtgcgcgtctcatttaaatgcttactagggcatgaaattggtcatgcttagaagtacttgcagagtgggtatgcaaggccttggcgcctaaaaggctagaatgtatggagtacgaatatgtaatgtagcatccttgatccctgtggaggattcgccattaatataaggatgcggcagtaaagcggatgatattcggggagatttccacatttcccctatgtttttcctataatttcccagatatggagtatctagtactcttcccccacttgagagaatcaatggtctataattgtcgttcacgatcccgccgcttctatgtgatatgccaagtttgaacacccaatgccgatgtcatatacccactttcaataatgatcctttagaaatctctccaattatcttcattgggctctctagactaaccttctaagagacattgtagcgccctattcctaatgtggcatctttggagccgcctaaaccgaaagggctgtaactgtctcatttcaatttcgttttgacgtggagaaggctgtagattgagttatattccgagcagctaaatctgatttatattaagtaaaggtgaccgttagtacttttggtaattttgatgtactcggaatacttgcaatacttagaatactctctcttctttggctctttttcgagttccatacctgaattcccctcctttctcatctttgtccattttgacactttcgttctattcgagcctcgatttctttaggccatttcgttcctttttctgggatccttgctataatcctctgaagaaagaattgcttgatcctgcaggaggggaaggctgaggctcgacatcgggaaaggttgacttgcagagaacgtcaaatccatttccactcttagtggaatctacgaggcgctactcctagtggtcttttcccctgtcagggtgccactaactagtgggagacgcttcgaggctattttgtcccataagctgtgtgccaccatcggccaccatcgaacgttccggttatcgtctttgctatcgtgtcatattgcttccttttttgtccatcgcacatctatttgggatttgggtattgaagacgctttcggcgctattctctccaatatccttggtggtatacccacccgttgccgccactaatccttagctcttcgaggatctgtaaccgagatctcgctgccatctgatctcccccgctccaccacatcctagcattcaggagtgatctactgggtttcaagcgggtttccattgttgctaatatcccggcccggttctccgtgatcctgtaactttatagacgctcgtgtcaatcctggcaaatccctggacgttggcacaaactaccgggatactgcagacaccctggcacgaaaaccatgcacctgagaccgtgactgctcgggactaatgcgagatggtggccttttaagctagcttcaatttccttccctgtcgcagattggtgtgggtggactatttcgagcgccaatattcccatcaacacccgctggaatcctttgtacaaattcctctccctcatcttcgcttcgagcttggaatgtacacgatcaatccatctcgctttgctgccacctgatccaaatttgtccgacactccactcaattctatcactgtaccttgaatatcgaaaattaaattggtacgtgaaaagcgcctacgtcccgatagagagagagctattgctaagtcgcctggatcctttcaatagatacccctttctgggacctgaacaatccaacagaaagccgaaattcagccgaagacgatctcgttgactcgttccagaccaagtcctttccttgaaaccatccgcatttaaggacacaaagccaccgagcacatcatcacactggttgttgtctgggtctgttatgtagatggtcaattgtgtaaatcactctgaccccacatatcattcgccatgccaacctcccaaggatcaagaggatctggctccggttctgccataggcccacgttgctacgttggacccttcggtcgtatgttacccatagatggcccatcctcggagcagcaacccgagcttccagctaatttacaagaaaccggggaacacctataccagcttccacccccgcgggtaccgactagtttacaatttggatctgatccctttccacggcagaaaaacagtcccgagcgcaaagacagtggatcagagtcccagaagccggagcaacttccctccgtgaggcagatactcactccaacaccggggacaaattcattgcaatactctcaaccatttgcaagttcgacactcaacacaggacgtcgtggatctgcataccctcactatcacgatccgactttccaggttccatcatctgcacctgatagaggccgtgctgaatctcttccgcaactgcacggtctgccttcattgtcacaagtgggtctgcagggccacagaggcataagaagccagacaccgacaagaagtgatccacccgctgcatcttttatacagctaccttttcacacatcctcgcatggtcaaataccaaatggggaactatcatcaccggaaagttcaaagcggtcaaataaccagccccttcgccctcatgtggtagacgagcgagtcatcgacggggaactttgcttcgtatatgcagacggatcgtcctgtcccaaattcatcgacggtacacccgtcaacgcaaattgggggataacgaaggccggcaggccgagaaaacgccttggacttgcctgcttgacttgccgcgagaagaagatcaagtgtaatcctaacccaaccgccgaggccgtatgtgatcaatgccggaaatctggacgggaatgcaggttcgaaagtgcgtaagtgcgatcgtaatctctgagaatatgcgtccacggacttacctcgttgaaccattgctgatccctcaaagcccgcggggtagccgtcctcccatgagaggcccatctggcagacccgactcttacgcccccaccagccacggggctttggacgtttctccgtcactttacgacatcactcgagcctcggacagtgcgacctcccttcctggaactaccggccactcaccgatgccagagagctcgatgaagacgccgtcatcccaagaagccacttatgaaacgatgaccgaggcggacagaggcttgagatcccgatcctaccaatttccatcgcccttatccggtacagatgaaactcttggacgaccatcgccacatgccgagtctgttcgttctcctgaatactctgacattctggggaaactcaaggacagcaattcggacgacccactcgcggcgtcctggaacctggacccgtacgaaagcgacccagagtccgtggctcactacactgagtgttatttctcgcacgtgaatgacggtatgtgccacatgttcccgcgtggacgattcagctcgtggttgaaaacctgccccatcaagtctgcacacgacaagatgctcctttattctatgatggctcttggatctgtgttctccgacaggccagaaaaaatggcagctatgacgcgatattctcgcatagcacgatttgctatcaatagaagccagcataccctttctttgcaactcgcccagagccatatcataatgagtctctggtactacgctacggggtcgctggtcggatcttgggactcgataggcgcagcgggaagagcggtctttgggcttcgctacaatgtggaatctggcggcgttgttgtagaccacagccaagtttgtgaatacgggttacatccacaggccttgattgagtgccgaagacgaactttctggattgcctttgtgcttgatgtaagaaatcgcgcatcccccgatcaggaactcaatcctagttactgacaactactaccagcgcttctcgagcctctattccgcttcgtcgactttcatctcgtcggatgcagccctgctgaggcttccgtgccgagaagaaatatacgagactcagcagtacgcgacagtcccatatttccaatcatttctcaatcacaccgcagcctccacaggcgatgaccgctctaccctaagcccaatggcttttttaatcgagatcatggctatttggggggacatctcgctccatataacccggctaccacacatccctctcgaagcgtacaaccgacttgccgaagaattcaacaccaccatcgtccaaaaatccaaccaatggatgacccgactccccgaatacctggcattctcgcccacaaacctagaacgaagcatccatcaaaaaaatgcagacaccttcatttcaacccatttgttctaccacgtcagtttgatgaaactgtacagacacgcccgctaccagagcctccaacccgaaatccttagccaatacattcaccgcgctcgataccacgcggtcgaaatcctccgcatttctcttaccttcgaccagtgcgccaaaaaacttacaccttctcgaaacaacacagagacatccatatccaaattaacgcccctgaaccccttcctcggctatgtgatcctatcagctgtggatgtcctcagctccgctggtctggcgtctcagttgcatgagtgcatctattatattagaggtgcgctagatgccgtccacgaactcggccgttactgggacagctcgttgcaactagtcaccgttctccacagacgcctgagtctgatgatgacctgcctgaatgagcgcagcgtcttcgctgagaaacagggttttgctcttgatggcccgccgctcgagacgaaggtccatgctggcgctttgcattcccatccgccttcgacaacgggcgatgatctttttactggttctatgcctagagaaatgattttgaatgctctgcggcttgatgagacacttatctcggagagtcgtattacttggattagagatccatgagaggattttcccctctcggctctatttccctcctcctgttggcctcctctttggtcgggctccggaattggtgtgacggcgtgattgatctcctcgatatttttgcagtggtaagggatcttgttttctcttatcctgttacgatgtgatggatgcatttcaataatgatggtgacttcgctgattgatttgaaagtatcgttgctatgtatagatggaactgtgacctacatgacctgactttgccttttatttgtatattatagtatgtcatttaatttctgctttctttgagcgagcgctctgctactcctcatgtaccttatatcttttgggagacaggagaagcttaattgaagccaatgggataaatgaaagagtgatttactaatgtttcactattttattacaaaatcatatagaatgctatgctgctatgatactgtagttggaaactgccctgaataaataaacctgtcttcaacaagatccatcaacaccgcgtaatgagtatcttcattaacaattgggttcgagcaaagccacccaagcactgtcccaagagtaaccaacacttcagactcaggatcttccttcatatttcgtttccactccagatgaattgacggggaagagtagcatcctttaagacgttgctagcagatatcttcaatgtaccaaccgttttcgcaattatctatcaaaagagacatttccacccatctatctaagtaatatgaaccgcgagacacatgagatctacttgtatatgcaatactgatagtactcatactaattaatgtccacgggtggtcacatcactccaattgccctaagccaataggaatggagtctcgggttggcacccgagaacaaagccattgtattcaaatagtcaccgggtcgatgtttcatattctataaactcgacatttgaaaccaatatgggattatctacttgataatgagctaactaaaatagatctgcagtatatcatttcccccagtcaatgctccaccataacacctccgagcggggattccaacggagatgcggaaggtttctccggaatttcgatttccctcctcaccttgtttcattgccctatcgcatttcatccaaccaccccaaaatgaggatatatatatagatatcaaaaaaaccgagtgcgtgaaaagctctcatgtcctctttcaagcagcccgggacgcacgagttccccggcgcggagttccgcacgacggtggaagatgacggactcgacgccgactatagcatgatcggcgactacccagaggaacccgactattatgtccagctgggccttgcgcgcaatccgcccccaacagacgccgagatccgctccgcctaccgcaacttaaccctcagcttccaccccgacaagcagccgccgcatctccgccatgcggccgagagtcagttcagacatatccaggaagcgtatgagaccctcattgatccaaataagcgcattgtgtatgatatatcgggtgcagcgggcgtgcggcaggaatggggtcagcgcggagtcatggggattggtggggaggcccaacggctggatgttggtgttaaggcgatgtcgccggatcagttccggcgctggtttttgaagacgatgaaaaaacgggagcggaaagccgtcgagagtttggtttccagcaaggtatgcaatttctatattgatcttccttgggaagttgcgcgaatgtgctgttgctgacatccattgggcttggtttagggcggtattaccctgggaatcaacgcggcatctatgatttccgtcgacgaggacgacgatgtgcagttccatataccttcaccgaaagtgacatcatatggtgtttcgtatagtttcaagacgccggtgtcattaccacagctttggggcacggcagagaatgaggaagacacctcgggtgtggaaccggattcaggggaagatgtgccagacgaggaacaagagcacatgcatgtgatttggaatgcaggtgtaactggaggtttggctcgcccgatcaagaaagtcgctgttgagtaccaggatgggacagaaggagaagaaagggtatgatgtgctgcatgttcgcatctcgaaatttcgctaaacatttttcagatcgaaatgccaccgctcctggcaagtcagaatttccaatttggggccactgtgactcccaatatccaaaccctggtaggcaccaagggaatctgggccaaacatcctttctctctcctcaaggattcccaaatcagcttcaatgctcttcttctccctgccccaaccttgaaagcaagcatcgcccgggctttccagccaatccccggcaccaagccgttccaggtcagcgtgaccagtatacatacgcgctctttgggggaaacggcgccttcttttgagattcaagtctccagagaagttgccaaacagaagatcggcaccatgacatggaacagtggtgtcgttcagtggcccgaatttcttctcagccagttcccatcaatcggaatgggagctcagagtgccattgcatctgctaatgaggtcagtaacctgcagttcggtctaatctcgctccccaagcagggccaagctgcaatcgatttcgacgacgacgacgaggagagtggagaaatggacgaggatgtccgtcatctgctcaagaaaaaacgccaaatcgaccaatctgccgaggcatggcagacctatcttcaggtcactcccggcggaggcgcttttgtcttgagttattctcgaaacctcttctccgggaaacccgctgatgatccggtcaagactgaatggagctctgaagggtacttcccgatgccgagcatggaccaggcccgtgctgtgcgactcgagatctcgagtgttcttgggttagacatgactctcaattggaccattaagggtgttcgccgggttggcgagtatacgcgtgttgggctcggtattggcatcgcagacaagggtatcatgatgacagtttcatggcatcgactcggtcagaatattaatattccgattattgtttgcccggctagtgaggcaacaagcggagccgcagcgctgaccgctatattcccttggctggcctactgcgcgattgagtttggctatattcgcccacgcgatagaaaactccgtcggcaggcagctgctaaacgccaccgtgagctcaagaagttgatccctaagaaacgtgaagagagtctccaggccatcgagctcatgaccgatcaagtgcaaaggcgccaagcgcgagaggaagcacaagacggtctggtcattcagaaggcagagtatggttatataccgccagtaaacaagaaacccaaaaatgggttcgcggagcctcgggtgattgatgtcacgatccctgtggctgcgctagttaaccggggtcaactggtgattcccggaaaaaccatcaaggtaagtcaggcgatagccttgaattggtcaatcttctttagagcggacactaatttgaatggatctagttccaaattttgggattccatgaccctgcgccattgctgcccaaacgattgaagatctggtatagattccaggggcgcgatcattttgtcgaggcaggtgataaagaggacatcgcatgccccatgcgtacgcactttatatccgaatgagtataattagactcatcaaaaggtcgaagaacccctaccatgtaatttataacatccagtcgttcattagcgacttattatttcaacctccattctgatgcttttactcccctttgtgtttttactaaatagttgctccgctgctcagctgctataatgcagggttgtcataatttgaagcctttctccctataattatcctaataatatcagtctcttgtacaaataacgtgagtcgtgacctcggaaattgttgctcaacgtcggaaagtcttggcataatttgatacggcactccataaagaccagccgtgcaattcgtcccgaaaagccaaatggagcgtcaccccgtgatatcttctcatcaaccacgagtgcacagctcttgagttgcttactcttgaaatgtcgacctctatcgctgcagggcttttcaagtccctccccaaaccgaaatattctggcgaggaggaggagttgccacagcatgcgcaacctcgtggcccgcgcgtggtgggcgccgaccagattgatgaaacacaggtggtcctacgagtgagttgtggatcattctatcgacataccagtacaataactaattgattctatctttcagaggactggacccccgccctacggaaaccgtgcaggatggcgacctcgcgcccccgaagatttcggggacggcggcgcgttccccgagattctagttgcacagtatcccctcgacatgggccgaaagggaaagtcgtccaagtcaaatgcgcttgctcttcaggtcgatgccgaaggtaaggtcaagtacgacgcgattgcccgccgcggacacgccgacaaccgcaccgtccatgcctcattcaaggatttgatcccgctccgacagcgggtggatatgggggagatttccctggaaaagccatctgaggaggagatccaggctcaaatggagaggactaaggctgcgcttacaactttggtcgaaggagcttcgtcggcgcagaagccgaagaacgtcaagggcggacaacgagctgagccgacttttgttcgatacaccccggccaaccagatgggcaacaccggccgccagaatgaccgcattatgaagattgtcgagaggcagctggatcctatggaaccgcccaagtttaagcacaagaagattccccgtggcccgccctccccgccgcctcccgttatgcactcgccgcctcggaagcttactgcggaggaccaagaagcatggaagattcctccgcctgtgtcaaactggaagaaccccaagggttacaccgtgcccttggacaagcgtttggctgcagatggtcgcgggctgcaggatgtctccatcaacgacaagttcgcgcagttcgcggaggctttgttcacggcagatcgacatgcgcgtgaagaggtgcagctccgagctcagatgcagcagaagttggcagagaaggagaaggcacagaaggaggagcatcttcggatgttagcacaaaaggctcgtgaggatcgcgctggtcctagtgctcgcgtgtcacgggctcgttcccgctctcgaagtgctagccgcagcgtatctgtatactcctccaggtctgctaccccaagcgaagatgacgaagccgcccgagaccgcgcagagcagcgccgtgagcgacgacgcgaagatgaacgacagctgcgccagtctcgcatgggcacggagcgccgcattcaaaccatggcccgagaacaaaaccgtgatatctccgaaaaggtcgcgcttggtctggccaagcctacacagagctctgagtccatgtgggattcgcgtttgttcaaccggaccagtggcatgcaatctggtttcaatgaagataacccttacgacaagccgctgttcgccgcgcaggacgccatcaacagcatttatcgtccacgtgcccaagctgatgccgatgacgaagatgcaggcgaaggcgagatgagcaagcttgagaagaccaagcgattcgaggtcttgggtcgcgccaaggaaggattccgtggcgctgctgaagccgaggtaagcttctatcccatatgcatttcttttcgtcgctaataagttattctataggagcgccaaggtcccgttcaattcgagaaggacactgccgatccatttggtattgacaatatgattgccgacgtgacttcgggtcagaagcgttatggaattcaggaagctgaagatgtcgaccgcaagtcaaaacgcccgagggtcgacgacgaatgaatccgctttgtttaatctttcttccatgtgtctctatgttctctccttgtctctatgcaggcatcggaaaaatatccccaatgcattgcgggcgtttctggcagtgtaatctttaccattatcttgttcacaaagggaaatcgaatcaagcgagtcacttgggctcgcttgcatgatatgggatatgccgtctcatttacagctacaataaaaatatgttggtctacatcttggaattaccagtagtatgttgtattgctagtgaatgtgtagattgagacagctttcgcacaggtacgatgaaagatgtgggtcgagggaatgtggttggataactagctacatccacataggcaaaggagactgagggttgtattccgtgggaccgtcaatggctatggagtccgtatactcagccatgactttctcagagagctcgcacgagaactggactttgatctggtataacctgcatagacctcaacaacttggtaatgttgatatccttgtaggtaaagtaccctgtcctccgcctgcgctgtctcatggggctacggagagatggcggtcgagagggatggggaaaggagagaagaagagaagaggagaaaggtgggaggagcccttttataccccaaacccacgtgtcttcccaaactttgtggccattgtgtttgcctggctgccccaggctcctcagtagatagcactatgtcttctaggtgtacacaatacagatacgtgtatgattcttgcctctgtttcgtcgcattgataacggaccaggcacaagatggctgcgactctttaaagctttgtaccctcaaggccatgtacctcatgtaccccaggtggaattgaattcacgcaagtaatattaacattatgctggtctaaagcagcccggaggcagcgtactatattgacacagcacccactcagttcttcacctccttcttattaggagatagcacactctccaaccacttgtaagccacaggcagactatcagggtatcccatgtgcactcggttctcgaacaacctagcttccttaggaccgccatgcttgagaggctccatgcagtcttcaatcgggacaacgccgtcatccacgccctagaaacatatcagctttgttttctttctcgagacggctgaacaggaatacatacgttgagcataagcaaccggcaattatcctggtcaagaataccagtctccacaagcgagaacttcttctgagcgttcttcacaaactcctcctcgttgtcatagccatacttctccgccatagcggaagtaagcctacatcatgattagtattccaccacataaaaccaaaacccagtcagaactcacacaaacggatactcatgatcatttgccttagccaaccactcagggctaaaaacaaagtgcgatccaggtccatgagcaacagccccggcaagacgcgcacggtgtgtacaagccgcgcggatagcatagaagccacccgcactaagcccccacgccgcgacacgcgacatgtcaaactccggccgccgatccatgtaatccagcacgctggaccagagcctatcgggcgactcagggtcagcgggatctgcaggcgagtccgccgtcccgggaatctcaacgataaccgtcgcccagccacggttgatgatctcgtgggagcgctggctgttgtcaggcctatacccgtcaagcccggtcatgagcagcacgacggggacgcgattggtggggctcgcttcctccggcacccggatgtacagcgggatcgaggcgccgtcgcggcccgcgcggtgcgtgtgtgaaatcacttcctccgtgatgatgggtttccatagtgaggcggctttcaggtacacctgcttctgacggtcgaaggcggcgcgcttgacagatgtctcggggcgtgttgatgggcttacgtaggggaagcgcgagatgcggaggatgactgctgcgcggcggtacaggtctgcggcgcggtcgagatggccgttgttgagggctgtgtcggcttcattctcgagggctgttgctgttgggaggaaggcttcggtataggcgtctgtgtttgcgtcgttgatgttatcctgttgttgttagtcgtgggtttgggttgtattcaaatgtttgacgatgctcacagcgatcagcttttggaaaataggctcgaagtcttccacggatccatcgtggaatgggtagatggatttagtggcctggtcaattatccgtgttagttccctgtgtgttttctgattgttgggaagagacatacgcagaatttccactttgactcccataggaccttgatcgatccctgatgagggtagacagtgtcgaacttgtctccgaggatccaattcaccattttgagcgggatatagacgaggtagattgatgggtttcgtactgcttatggcttttcgttgatgaactgcaaatttgaggcatcttgagcttttttcattgacttgccaccaactgtattcgccggtagcagtcattaccaagcaagccaaggcagaatgatgtctatcgagatgcaaacagtaggtgtatttgccgcaagccgtagatgagaccggatcggcagagatctgatgaggttgcttcgaagacttccggatgcggggaggtgacagccaagatgacgagggtaaggaatgtagatcagatcgtactctcagatgtctcattactcaaaatcccgctgtcaatttctcttcgcggcttttcatggcatttctgtcggcttcatcattatctagccttaggtaaagtgaaatgaacttttgtactcaaatggtagaatagtttcattctgattctatggaaaacaacatagaaacatatatctaaacaagagcaacgtatgattcagatggtaattggccctgatcctatacatggcctcaaatacaaaacatatatccgacatctccaattcaatatggcaaccccacgagacatcgattagatgttggctccaccgttacaaggcaaaatttgacctgcaaataattagcaagattcccaggggtgaatttaacattccagtactaaccgttgatccattctccagcaggactggccaagaatgccacaatgcggccaatatccgcaggcacaccacagcgtccaaggggactaccattagcaagcgccgtctcaatatcctcgatagacgagttctggtcacagccaggcgcatagcgccacgcgttggtcaaccacatatcactcttgacaccagcaggagcaatcgcgttaacagtagccctcttcttgccaaagtcagcagcaaagcagcgagtaaagccctccacagcgctcttgctgcccgcatacagcgagtggccgggcacacccaggcccgcggcaatagacgacatcagcacgacacgcccgccgggctggatatagtcgtaggcattcttcgcgacgaagaactgcgcccgagtgttgaggtcgaacactgcgttgaagtcctccagtgtagtctcggacaacggcacgaacttctccgttccggcgttcgacacaacaatgtccagctgtccgaagtgggacactacctggcggaagaggttggcgatagagtcgacgtttgtcaggtcggcttggaatgcggcgccgtggacaccttgcgcttggatatcttgtaccactgcgtcggcggtctttgagctgctggcgtagttgatcgctacgcttgctcccttcttggctagctctagcgcgatgccggctccgatgcctcgaccaccgccggtcactaaggcgactttgccggcgagctcgggctgggcagcgttggggtttgcaacgaccattttggcggttattttgatgttggagggtgtggaggattgtagatgactgggtgtggaatcgtgttgagagagggaaccctaatctaatattgaacctgttagtaacaccaggatcttggctggagtcagctggatggcttggttccatcattcatacctattgcagagctgggctttgtttccgaatttgtcggtgacctattacagtgccagtcattagggcccacagccaacatcaggtcctaaaacagagtagctgtttgcgaacaaggaccttgtaccgcatgcggaagtccacgaggggctgtctccaccatctgtcacattagaatccctcggttgcattgttgtgtttccgtgcatgggaaatatgctggccagatccggggaatgttggcatcaggggaatttgtggcaagtgaataatcacacggcgcgcctcgcagctataaccacatctcgaactatctgcagaaatcaaagattgccgaacaaccatgtctcctgccgtaaagaacatcaccgctgagcccaacttggacatcagcttccagggtatgtttcaatccaccctcattcacctgcttgtgctaacagcaacagactacctcatcctctcaaagctcgtcttcgactgggcggacagctacgatgccaaggtacacttccaatcgcattaaaagtgaattcaacattaatcctgacactatcccaggactgggaccgcctgcgcagcatcattgctccaactctgacggtggactacaccaagatcggtctgagaagatgggacaacatgtccgctgacgaatacatggccatgatcacccatcccggcttcctcggtgacaaaaccatcaagacccagcatctgcttggtcagacatggtgggagaagatctccgacaccgaggttattggtcaccaccagcttcgcgcggcgcaccaggtctacgaaaccgaagagttggagactgtcaagcttcgtggtcactctcatgctacgaatgagcactactatctcaagatcgatggtatctggaaatttgccgggttgaagccgaatgtgcgctttgatgagttacgctttgacgaggttttcaagggccttgactagatgtcaatgggcttttgcgaagggaaactggtacaactctatatagtataagaatttattttacttggtttccattttctgtgaaattgttgaacttatggtaactagagaaatcgcgagacttctctatgcctgaaaaacaaggcctctatttgaggattctgggtttccccactgcaatatgctatatttagccacaaggtacgacaacatcatctctccaaatctcagtccgaaatagacaaatcacagtgatcatagccatcatcgctcactgatagatacaccttcttctctgccagtctagccttctcttctgtttcactatacccccgcacttctttgagggcacaattcaccagtgaagtcaaatcttcatcattcggatgttgccgacgaatctcttcgaaaacttcgataccgtcaggagggttgtaatcttgaggtccacgctgattaaaggcgaggacttgcaccgcattaaccgcgattgcagtggctttgagtatcttcgctctgtcattttcggtatagacgttggaagggccgaagctcatcaagagcttagcaattggatatgatgtggtcaatagcatccaaatagatatattctgatcgacagattctgtcaacttgcgtagatcatggagcaaatgcgttttgagaatatcggcttcagtggcaagggagaccttgttgagtggcatcgtatttctcgcccggtcaatcaagtcaaggacaaattggccagcaggcatattcgccaatgaagcgatattctccattccatacttagcatccgtactaaatgggctttgtgtgtggtctgtttctgcagatggctttgtgtttggttctcccgcgacgttggtcggttcattcattactgtcgacgaggaagcgtcaccacggccatactgatcgggaaacctggtattggagctcacgcatgcttgtggagattgggttggcgattcgacacttctttcagataatttaatccgaaagtccgcgcaatgagccctacattggtaatatgacggtctttgaggataatcaggcttgaactcgtagcacattcttcagggacatactcacgtaatacccatggtgccccgagaaattcccgatcgttctcagcaaactcaccccagctggtcggtacaaagagccgggttaatctaggatacctttgagttacttggacgcaaaacgggacattgagtcctaggttgtcgtctttggtttgcggtctctttcctgattttgcccagtagatgaagattccgagtcggtaatctccatcttcgaaatccctaggtctgacattatcgcaacagaatgcatgggaagccattgttttgggtggaggagatgagagtggacccgacgagctggagagatgtgcagatcgatactggcagtttaggtaccgttgatctgttgagttgatcataatgtttcattccttgctgtatacttttagaagacccaatacacaagtttggtttaggggagaaggatccagggtacacttaaccttctgtatatcaatctctagtcactgtgtagacttcgggagtcaaaatcagcaatataattcagatgtgtcctcgcacgtgtagaggtaaaacaggcaagagcccaccttgggggtgccttcctgatcaggtgccttcccatttggtcaaaaatcgtcaccaacccaattccctcatttaccttaagccattggggaggtataaataccccctccccccccccattttctctcttcttctttctttcttcttcaacactccgggtccacattgcaaatcgcgggtcgcgtgacatgggttctgtctcccgttgatcttgatggcctcaacatccagtcatcaacatccatcatgaccttgcatcgtccttcatggttaccgtccttcatggtcactgtccttcatggtctcaacattcacagtcatcaacatccatcatgaccttgcattatctatcatgatcatcgtccacagtcatcaacatccatcatgaccttgcatcgtccttcatggttaccgtccttcatggtcactgtccttcatggtctcaacattcacagtcatcaacatccatcatgaccttgcattatctatcatgatcatcgtccacagtcatcaacatccatcatgaccttgcatcgtccttcatggttaccgtccttcatggtcactgtccttcatggtctcaacattcacagtcatcaacatccatcatgaccttgcattatctatcatgatcatcgtccacagtcatcaacatccatcatgaccttgcatcgtccttcatggttaccgtccttcatggtcactgtccttcatggtctcaacattcacagtcatcaacatccatcatgaccttgcattatctatcatgatcatcgtccacagtcatcaacatccatcatgaccttgcatcgtccttcatggttaccgtccttcatggtcactgtccttcatggtctcaacattcacagtcatcaacatccatcatgaccttgcattatctatcatgatcatcgtccacagtcatcaacatccatcatgaccttgcatcgtccttcatggttaccgtccttcatggtcactgtccttcatggtctcaacattcacagtcatcaacatccatcatgaccttgcattatctatcatggtagaaaaaaaatgggtcacctcgacaagcaagcatcaacattcataccatctcaaccacttcgacaaccatcttgacctttgactaccatcttaaccactttgacaacaactttgacaaccatccactttgactaccatcttgaccactttgacaacaaccctgacaaccatccactttgacaataaccttgacctttgactaccattttgaccactttgacaacaactttgacaaccatccactttgacaaccatccactttgacaaccatccactttnnnnnnnnnnnnnnnnnnnnnnnnnnnnnnnnnnnnnnnnnnnnnnnnnnnnnnnnnnnnnnnnnnnnnnnnnnnnnnnnnnnnnnnnnnnnnnnnnnnnnnnnnnnnnnnnnnnnnnnnnnnnnnnnnnnnnnnnnnnnnnnnnnnnnnnnnnnnnnnnnnnnnnnnnnnnnnnnnnnnnnnnnnnnnnnnnnnnnnnnnnnnnnnnnnnnnnnnnnnnnnnnnnnnnnnnnnnnnnnnnnnnnnnnnnnnnnnnnnnnnnnnnnnnnnnnnnnnnnnnnnnnnnnnnnnnnnnnnnnnnnnnnnnnnnnnnnnnnnnnnnnnnnnnnnnnnnnnnnnnnnnnnnnnnnnnnnnnnnnnnnnnnnnnnnnnnnnnnnnnnnnnnnnnnnnnnnnnnnnnnnnnnnnnnnnnnnnnnnnnnnnnnnnnnnnnnnnnnnnnnnnnnnnnnnnnnnnnnnnnnnnnnnagccaccatccaccatgggcctctcctacaagaaccgtgaccatcatttcgtcatattacagagacacaaaggtttccacggctttccaatcaactcttctctcttttttgtcagcatcaagtcccacggccaacctgcaaagaaggcctgccttgaggaacttcaacttctcggtcaaaccaatatccactacagaccaacccatacaagccagtaactcgtgaaagcttccggatcaagtagtatccactgactaagtcactttcaccaacaaacacgggttgacatccacaaatcagaggttttttatgtctcatatcatcgtccaaagtggttctgtctgtacgaaccaacgtttttatgtcattggaaattagttagaagaagaatcaatttttgctatttcattttattctttctgtagattaatattcactttgtcctaaaccaaatacaaaaggcaagataaaaaggctaagcctctagggatgttgatacaagggtttgtctattgtcttctatgcctatggggctacgaggcctattattttcattttctacaggaacgatactctgtgtgaccatattttgaatattcattccatgacaagtttatccttctctgtctccaacagataacacagattcccatatagcaaaaacatcaactgagaccagacattcaataatcacaacctccacaatctccacaatcttagtcaaacaacaagtaatcgtacccttcatcgcagtcatagttgccatagtcataagaagacagcccagaataataacaaccatggtcctcaatatgcaagtagctctgactcccactgtcttcatcatgggaagtatttcgagtctcaagtcgaagcgaagatgacacaggctggtctttgtcgctgttttggttgatatcttcagtcccatcatcaggagccaccccaggatcttggtcttggtcttctccatcacaatcacaatcagaatccatagacccagtctcaacaataattgaagacggcacatgcttgtcggaaccctcagatccccaactatgtccacaaccatatcctaactcaaatccccactcagagtcgtatccaagatccgagctagcttgttgttcgaacccagattccagcacaggctttggtcttgatgccgaccccggcctcgttccagatccagatgcagatccaggcattttctgcttggctgcattctcaaggtgcttgagcggtttcgctacactatctctccaacgacgcgagctccccgtgctcggttcgtatatattaagatcatagactcgacgatgctcgtggcatcggaggatcttgcgtctgtttcataattaatataaggatatgatatgataaaggggacgctaatggttcaaggattagtcaactcactcgtgaatcttttcgaaattcgcatctgcaatgtcgtatgtggatacttcttcgaaattcccgtctgtatcgcttgggacgaagtactggatggactctatcggtcctcttttggcacgttgtatgagctgcatgcagacgcttgattcggagggatcgatggatcctattgaagtttcgggtgtgctcagggcccattttgtgaattctgtgaaggtttgttcgtgctctgggtttgggagcttttttggttggatggcgctgcagcagaatagatggtttgacattttgacggtttggtttgaatgagtttttatatagatgatggttggtaggagagaggatttatttcgtgggggactctgactataggctgtgtgaagtcgtcaggatgtgctaattccctagtattgctagattaggaaacggagctgttattcccatgtctagacttgcgggtattatcgggatggaaagtactatgccactttcatattttagttttggatatccatggtagaaagtaggaagttggagaggcatgtgaaggtcattcgtataccgaccaaatggctggcattagattaattagtagaaaagaaaatctgatatacaagcattaataacctctaaaaagacgcaatatcatatcacaggtgctggcatcactcccaatccttgatctcagccaggatatcatcatcactgaaaagagttagttgatgagcacatttcggcctttagagtgtactcacttagagtctttgatgggagagctgtgaccgttattaataacatagccgctataggtattctggtttggccacgggcccttggtcgactcctcgtggatagtgatgtggtggtcgtgcggtttgtcggggtgctcgacgtagacatcagtgtgagggactttccagtaaccatctgtgttggcactgggagatggcttcggtaccgatgcttgggacgatccctgaggttgattcgcctcagcgggagcatttgtgcccttggtggcagtatacagagcgccgtgattggtggtgggaggtgtggtgtcaagcccagtcagatcaagaccatttttaccagcagcatttccgctgacgccttgagggtaggcagcgcaggtgtcgtaatggctctgcgggggagcgtgcaagctgtgctggaaggtctcgggggcctcgatgatagtggccatgagaccagtctcgacgtgccactcgacgtggcagtggagcatccagacacctgggttatcggcgcggaagcggatgacggtgtggccgttgttctggaccatgatggtgtcgcgtctgatcggggtgttggagacgttgctcgatagacccgtgtagaagccgccatcaactggggtacgctgcagaacctggaattggtgaccgtgcaagtgccatgggtgcaggttgttgtggtggttgttgatgatgatttcgacgacctcgttgtacttcacgacgaaggggtttacttggccgtatacatcgggattggaggaaaactcgggaccgacggtgttggcagtgtagagcgatggcaccttcggggcgatgtacgtcttgccgttgacagtgaagcgcggaacaccgtctaccagaccggcggcggtatccaaaatgatctggtggtccacgggctgcaggatgggctcatggtcggcaggtaccaataggacatcatccacaaagtccgttgcggcgtcaatgttattgaagacaggaggcggaggtaggggcttggcatcgtcgtacaccaaccaggcggtagcattggggttgtagttctccgggatggtacgattttcgaagatgaacatcatgttgacatccatggtatcccaaatagcaaagttctgactggcatcaggtttggttttaatcaagacactcattcgctgaccagtcgcaacgcgcaggaacttgtctccagccgggtagggctcggtatagacgccgtcgacctccacgacagtcatctcatggccatcgaacacccagaagtggccgggccagtttccaacgcagatgatgtgaaccagatacgtcttgttgggcagaaccttgatcttggtgttggttgagtcgttgatcaatgccgcgtcagggaggggctcttggccatgggaggccgcagtgatcgtaccgagcagctccggcatctccttgtggtaccagtcgctcagagtgagtgtgaattcatcgtcatagtggaaaggagggctagggtcgtggacaatcagagcaccacggaatccatcggggtactggcccgcgttgtgtgagtggtaccagtatgttccagtttggttgacctgtcctgcagttagcatatgttcatcttttccaccgggattacccacatcaaagtgatattgcatgtgtgcgccgggggcaattgggcactgagtgactccaacggcgccatccataactccactgccatgctggcgcatgccgtgccagtggatagccgtggactcgtttccgagacggttgtagacatcgacgatcagttggtcacccaagttcacatcgatctgcgggcagggccattggccattgataccaatgaccgggcgctcaaacccatccggggcagcattcacccaagtaatgtcccatttcaggtaaacgtccttggcggcggctagaccagcccaggtggccagcgcaaacaaactaaacttggccattatggcagtattgaacgagcgaaagacgattggtctgattcaggaggatcgtaaaacccgccaaacgagtgcagtcgaggccgaatcaagaaagcaaaaacgaatgtcgaagaacgcggttgtcgaatgggcgcaagtcggccgctgtgctggatgtcgaccggaagagactggaaatggggcctctttaatcatggcgatagaataacaaagtggtcctgtcgatctgcaggggcctgagtatgctgctgaaatcagatctcatttcgacgttcgcgggggtgtcatgtcattggccgtgccttcattcacgacttgaaggctgggataataaacacgtagtagagcagtatcaggctggaccctgagcttccatttttttcctgttgaagaatgcccttggggggttgggagggtggaatgtagatagttcaccgaaccggaagacggtttctaaccgccacgcaaggggggcatactcgagtcgcactcgtactcgactcaaggcttcgtttagagtaagcatggcacgaaccggaagttctaataatgtatagaacttgcacagcatggattgacacctttgtgacttgacaggtttaatattgtggagtatcatgatgaagaagaatagtcgccgcaaacggattatctatctagttgtagtctcttagtagtctcttatatgttttctctgtagaaatcttctccttcttcacctgtaagctctttctctaaggaaactgcggcaaagggcggaatatgcttgatacggcctttctatgtacaacctttgacgaatcgacgatataagcattagcgagtcatataaaccccgagaataaagataactgggggtttcttattaaattgtaatatacctcacatatagactttcgctggttgatttaagttgaaaataaccttaagtccaacattatcctcagcacaacttaagcaaatcgaatataaagcatccaagtagacgtcaagcaaaaggcgtatgaactcctgacgcgataaggcggaggttcccaatcgggctgtgtgacgttgcagtgaaatctcttctgttagagcggcaaagaaaaaaaaaggtctatggcttcagcgcatttgctatcgtgtatccccggaaaagcgggagattgactggagatgttaccctagacaaatcagatccctgtctggagtcctgcatcccatacatgatcccagaagatctacatcgtattgtctgataggagaacagccgggaaacatcggcgtagaaggccaaggcccacaaaaaacgcccaggcacgagagcgtctccctaattgagaacagtctgataagctgtggagtaaaacgaagagatttagtgttagtcaagcgctggcgataacgtgggaaaaagtgggagggggagaagttgaagaggaggaggggttgccactatcttcacttcttttttcttcagagtctgagtcaaagagaccgtcggccgatctacagtcccaaatcttattctcaatcttgactgccactgacgacatatctggatggcgcttgctcaccccagatagcatcatcgagcctcaatggcgtaatagctggttctttattcaaacatctcttgcttcacaataccctgacctcgtgatatggatcaatcaatcaccctcatcgatgcacaagtgcacttcctagtgagtcattcatattcggcatacaacatctactaacctaatgctaggaggaatgtgtggtgctggtgcacatcccattggagctgtatccttacttcttaaagtctgttctaggactcattttcgatgaagtccctccactggaagacgagacagaccatgcatttgattatgaaaatgcttctgaggatggctcgtacaaaccacctgcattcatgaacgtgtccatcacgccagtggaagtctccgtcatgtgtccaagacgcctgctcgacaaatactttgtccccgtcatggaccaactcgaccagttggatgggtcgctccggtcctgtctgatcgtgagcgagaatgactatatccccatgcaagtgctcggcgaaggcctcgaggccggaaaacgagtcttggaactgaccagtccacttgccctggccggcatgtatgtgaagcctaatatatccatcccctatataaaaaacacccatactaacctccccagatccatcttcttcatctcaacctacttctccgactacatcgtagtcccccagcaaagcaaagcaagcgtgatgtccgctttagagaaaagaggcttccaattcaacgacgcctccgcagccttcatcaccaacccgctcagtcctaccatcgaaagaagactcagcgacctcatcccaccgggcacacccccaccctcaactctaggcgagctccaaacccgcaccttcaacaatctccgcaaacaccaaatcaccccctccgtagacaactccctgcgcctagtccagtgcgccgcccaccacgaataccacagccaagaatcctccatgtccatcctgcgcgacgccctcaccactgtcctcctcgtcgacgaaccccgcttcctctccctaaccctcgcagccctcgaccccgccgcctccctcctcctcgaaaagcgcctcctcccccgcttcgcccgccactccacctccgaaactggattccgcgactacgaagacggctccggcctcctcctcgggtccaaggaagaccacctcatccccatcaccctagacctccgcgacctgcccctcgaagcctcaggtatcgtctgcggcgtggcgggtcgtctcgcagacgcagctaccgtgaatccaagcgccgtcggcggcctcggctccgcgaggacgttcgattcggtcggtactcggctcgcgaacgtctcgctcgataaatcatcccatgcgctccagcccttgccatcctcgacgcaccatctccagcctgatgtggatgtcgccgatgcggtcgagattagtttcttgagtaccgcgcgcgctggtaccattattgttggcgaggatgagcttaggagggcgattgatgcgctcgaggaggagaagatgcagtcgcctaggcttgatggtctttgcttggagtctgagactccgccggatagtccgcagcagggttgagattgcgctttgtggatggcagaggatatgacttatgtgttcatgtgttgatgtggtgtatgggtagtaaaagttcgcttgttttaatatttgtatgaatagctctacttggtcatggattgcttgagtttattggtctgatgtttacttacgtcggtttgagatgaaattgttgtaaaatggtagtcatgtctgacgatatatatctccagagtagcaccatcatatgttcaacccaacagcacagcttaagataaaacgatctcaaattacagaaatagcagaaattgagattattatcttattatttcatatctcattattaatataatagcgctggacagacatacaggtcaaatttctccaacatctctctactatcctcgctgcaggcgaagacttggaccaacgtagtaaatgtctggtggtctgcagatgtacttctaccgatcttcgctctggccttgctcaaaatagccgcatcgcctggattgcaattgagaggtgctcatcaccaagcccattgaagcctcaaattgaacgaaaatggtagagggtagtaaggccgacacagacctgctagtccatatcggattccaccctatcgtcgtttcggcagtggcataatgcggcgcgtacgcggttcgtgatattaacgtcaacatgaggatgactccgagacctgtctgagacaagttcatccgtagaccctgacagtacctaaaccaacagtcagcaagtatcccaacccgccaaacaacacaatccttatcctcaccatcagaacatccagcagcccaatcccctacaccctcattccacgccacacaactaacagccttaaccttctccccaaccggcacagcagcaataacctcccccttaacaacatcccaagcaaacgccgccgcccccgcaaccccctcctcactcccactcagcacgaccgcatcccccatcgcgaaaaccgagcgcacgcgcagctccgcattccgatacgaataccgcggcttcccaatcccaccgaccaccgccttctcgcccccaaacgcattgagcaacttcccatccatgcggtccagcaagcggatatacccgtccagcgtcgacgccagcagcgcgttcccgtcgctcgagcagcgcacgcttgtcaccgggtgcgcgaggacgtcgacggttgtctttcccgtgcggacgtcgtagatccgtgcgtgtccgtcgtagctgccgcttgctattgagtagctcggcatgtgtacgtgtagtgtggagaccgtgtcgctggcttccgtgagcgtttggatgggtttgtagcttgtggaccgggtatcccagaggttgattgttgtgtctgcgctacctggagggagggaggacgttaggttaggatgctaggtgggaagggaagggaagagtgtggggataaggggactcttaccggttactacgacggagtccccatcgccgccaaattgcacggcttcgactcggctgttgtggccgctccagcgtttcgtcgtgatgccttgctctacatcccagaggaagacttggcgatcgcctcctacgctggcgaagcgcgcgttgtcggctgtgacggcgatgtcgaggacggagtagccatgtgcttcgtatttttggattggagtcgtcgtctcgactacggtcgggctattggtattgtttggaacggcgcgcgaaaggtgtactgctcggtctgaggagcctgtgaggacatatgtgccgccggagtttgagaatgttaccgcgttgacggggcctagatgaatgtcagtgtttgtgctttggaggtgatttggttgtaataacccctagacaataagactttaccattgtgtgttttaagagtgtggatatgcctagttgggaatattgtccggggcatggccgttgagttggtggagagaaggaattggagttcaaagaatgcgggagttcagagcttcaactttcaagtctacttaaagagtcctatcggaggggaaaaaactactactttacttcgaacgagctcacaagtattaattctgtcatacggaatacagaagaagttattatcaaagttgtagacacaccatcgctagctaccagcggtaaatggatataacaaacgaaacgaaccaagccaaagaaaggtgcttccaagcgcgaacggcaagacatagggtactcaaaagagaagaaaaaacaagagcatggttcgactactccccttttgaacgatccgggtggaatcccggtaaaattgcaacatcttaacgacgtccgtggctgcgggtgccggaaccctgcaaaccctcgatctcctgctccagggatttgatactggaataagtcagcaatgaattccaccaaacaacgctccggaacatacgctgcatgagtagcctccagatccttgttgaggcggtcgcgctctgagatgagcttctgctcccactggcggaaacgctgctcctcgaccttgacctgctcggtgaagcgcttgcgcagagtctcctcttcctccttgaacttggggttgtcgagcttgcgtggccgggcctcgccaaacttgcgggtctccatctgctgggcgcggtatgcctcgtagtgcgattcttccgttgtgtgaataaggtcgagcatgtgggtgcggatcaagatcgagcggagcttcttgaaatcgcagtgctcctcattctccacctcggcaacaccccaagcgtactgacgacccttgacgacacgaccatcgttggccttgacatccttctcggaaccgatgacggcgaaaggcatggcagccatcaggctgcgggcatgggaagcggcgtgctcgtcgtcctcctccacgggcggggtgtaaatcttgatgccctgggcctcaatcacagcgcggatctaatcaaaggttagtccggattctccccctcgtgcactcgttccactcactctatccttgtagcgcaccagatccgcatggctcagggtatcggccttggcaacgacagggatcaggttgacgcgggagctcagacgtttcatcacctcgatatcgaggggcttcaaggtgtgtccagtggggcggatgaagtacaagcaggcgtgaacacgcatgtcaatcttgtcggttcggcggggctgctgctcctggagcatgtacgactcgtgctggtcatccaggaactcgataatgggttgccatgaatcacggttgttcacgtagtctccgaatccaggggtatcaatgacggtgaggcggactagaaaaggacacctcgtcagctatcgaaacgcggaagtcgtagccctccaacacgagtatctgggtcgcacctttgaagaacttctcctcaagctcagccttggtaatctcaatctccacggttcggtcgacctgcttctggtggcggcgcttgtgatcggcatagttcttaatggtggtggagaagagggtgttgatgaaggttgtctttcccaatcctgactctccggcaacctgatcgaagcttagcatcaacacgggcggatcatttccctccgacggtgggacacaccataatagtgaaggctgcaccccgcttcgcgacaatcttgtgactatacaagcttgattagaacctttcctcgtatccactgtaatcactctcaggtacacaccgctggttggggagctatatcaaagagggcaagttagcttcagcatatcacaagggagacgcgggcgttctgaatagcttacgttggcaatgccaatcggcgtggcggtctctgaggtcgacatggtgggttatagggggattaaaaacaattcggaatcaacacaaaggaagatgaagaagaaggccctggtgtagagtaagacccaaattgagaagagaaaataagtcgactcctgaggagaaaaaaagggagaaggaggaacgaatgtgaaatcggatctctctcgaactgcccgtcgctgcttccccctgaatctcctttcgttttctggagtatacctcaccttgcctatctgggtttagcttgacggactagtaccgattgggtccgggtccgggtcattgatgatccgcgggcccttatcacggtagctggttgaattatctctaattttttgatctgtgagatcgccgacagccaaaatgaagacagacttcaaggtaggtactacgcttggattcttgatcgcatgcaattgccagcaagcctggattattaagatttatactaataccctcaattttagttctccaaccttttggggacggtatatcgcaaaggaaatcttctctttactcccgatggcacatgcttgctttcgccagtaggcaatcgagtctcggtcttcgatctggtacagtatgtgtcgcccgacagtccttcattcggtgatttgaaaccagcccgctcacaattgcttctatagaaatacttcctataccttgcctttttcgcaccgtaccaacatcgaccgtctcgatcttacgcccaagggtaatcttctgttgaccgtggatgaaaatggtcgcgcaattttgaccaacttccaccggcgcatcgccattcaccacttttccttcaaaggacgagtgtccgcactcaagttctccccgtccggtcgacatttcgccgttggcgtgggcagacgcctgcagatctggcagacgccctccaccccgggtaccgaaaccaatggcgagattgaatttgccccgttcgttctacaccgggatcttgctgcccactttgacaacatcgaaagtgtcgaatggtccagcgattcgcgcttcttgctcactgccgccaaggatttgacggcgcgagtatggagcatggatccggaggaaggtttcgagccgactactttggcgggacacagacagggtgtagtggctgcctatttcaatgcgacacaagaagtggtaggtgcttactggaaattggactggaatacatactgattcttatagatctacactgtcagccaagatggcgcactcttccgctgggagtatgtttcaaaaaaagacgaggaaacgaatgaagacatttccgacgcccgatggaggatcgtcaaaaaagatttcttcatgcagaacgacgctaaggtcaactgtgctgcgttccatgcgccgaccaaccttctggtggtagggttctccaatggtttattcgggctctatgaccttccagagttcaacatgatccatcaattgaggtacatcagtctgtgacaccctccctttcacagtggctaatatatcccctctagtgtctcccagagcaatatcgatgttgtgacaattaacaaatcaggcgaatggctagcattcggatcgtctaagcacggtcaattgctggtgtgggaatggcagtccgagtcatatatcctcaaacaacaagggcaccttgattctatgaacgccctcgcatattcaccggacggtcagaggattgtcacggctgccgatgacggtaaaatcaaagtttgggatgtcaagtcaggcttctgtattgttacctttacagaacataccagtggagtgaccgcatgtcagtttgcgaagaagggaagtgtgttgttcacagcgtctttggacggctctatccgtgcatgggatcttattcgctaccgtaacttccgaaccttcacagcaccatcccgactgtcgttctcctcgttggccgtggaccctagtggagaggtgatctgtgctggttcaccagactccttcgacattcacgtatggtccgtgcagaccggtcaattacttgaccagctctccggccacgagggtccggtttccagtcttgcctttgctgccgatggtaaccaccttgtcagtggaagttgggaccatacagttcgcatttggagcatcttcgggcggtcacagaccagtgaacctctgcagctcatgtcagacattctcagtgtggctttccgcccagatgggcaacaagtcgccgcatctaccctagacggtcagctttcattctggtctgttgaagatgctgtacagcaaggaggagttgacggtcgccatgacgtctctggaggacgccgagtggccgaccgccgtactgctgccaatgccgcaggcaccaaatccttcaaccgaatcacgtacagcgcagacggtagctgcattctggccggtggcaacagcaagtacatctgcttgtatgatgtcggaacggggtccttgatcaagaagttcaccgtttccgtcaacacctctatcgatggcacccaggagttcctaagcagtcgtgacatgactgaagctggtccccgtgcgcttattgacgagactggcgaagcgtctgatcacgacgatcgtgttgataccactcttcctggcgcgagacgcggtgatgctggtgcgcgcaccacacgcccagaagtccgcgtgacgtctgtggatttcgcaccgactggacgagcattctgcgccgcctctaccgaaggactccttgtttacagtttggatactgacttcatctttgatccctatgatctggacatcacaatcacaccgtcaagcatccttgccacactagatgctgccaaggaagctgccatatccaatactgtggatgaggaaaataccttcctcaaagctcttatcatggccttccgattgaatgaacaaaagctactccgtgtcgtatatgaagcgatccctccgtcagatattccccatgtggttcgctccgtgccctccgtctatttacctcgccttctccgatttgtagcacatgccgccgaagaaactcctcatcttgagttcaacctcatgtggattgagtctttgttcagcagccatggtcgctatttcaaggataacacaggcacattcgcaaccgagcttcgtgccgtccagcgtgctgtcgatgacattcgcgagaatctaaaacggttgacggaaaagaacctttacgatctcaactacctgctctcgaagcctgttctggggaacaagaaaactagcagtgctttgttggccatggagaccgaggatgctgaggttcctgatgatcagatggtcgatgctgacgagggagaaggtgactgggttggctttgaatgatttctatggggttttcttcgtgtatgtctacttgcatctgagccaggcgttttgtatattggttgcaaagaccaaaaaaggaaatagacagaggtctttgcggccttgtgtgaataatatcctccaagttctgctctctgagacctcaaacggaccctttgtccatctgttcgccttgagcaaacgccgtcccgttttaaaataaaaagtcttaccttctaatactatccgaatgtgtcctgtgccaccctgtctttacccttcttactcttcttaccgccgaacaccttccttaatctctccgcttccaatattccggacaatccaagtctccggagaatcatttatctaagtacctttcctctttctgctgtcaagagcaagatctcatcgtcagccaacctcgatatggccggcctacccttctggcccctcattggggtgttggctgtagtgctctatctccttcgacgaccaccaccttccagtttgagacatatcccaacggtcaagtacaatgcctatctaccagatttcatcaatcgactcatgtactaccccaaagctgcctcgatgatcagtgaaggatatgaaaaggtacgcagcatactgcaaaccacgcgttcacctctattgacatttctgcaatttctagtacaaggatagtccatttcgcctgctcactggcgatggagaagtcatcgtcctgcccgtgaaataccaggatgaactgagacatcttcctccttcgagactcagttctctacatgcccaatatgaagtaccatgagcttattcgtaccacattacgttgagatgctgaagctaatataatattcacagaacgcgttgggccagtacaccaacatcatcatcgacacccttctaccttctatgaccgtgcggaaaaagttgacgcccagtcttggtaccaacatcatttagttctcttattttcagcctcgtgctagagacctaatatatcgaataggtcgcgttgttcccgggatcatcgacgagctgcgaacagcattcgaaactgctctcccaggatgcgaaggtgggaccgaccaaccatgcagatcaacactcggatactgacagagaggtactgaacacagatacctggattcaaattaacccaaacgagatgttcacccgactaatcgccctcgcgacatcccgcatgatggccggcgacgccctccgcgaaaacgaagaatggctcaacgtcgcaagcaactacgccgtgaacgtgggaatcaccattctcctgctccgccctgtccccaaatacctccgtcccatcgtagcgcgcttcctccccagtgtccgtaagatgaggaagcagttgcgcttcgcgaaagacctcttcattccgatgatccacgagcgcagactggcacaacaggctaaagaccccaattataccaagccggatgacttcttgcagtggatgatggatctgagcgaggaaaagaaggaggacctcaaaccggataccctggcgcatcacatgctgctcttggtcacactggctgttactcacaccagcacgatggccttgtgccactgtctcttcgatttggttaccagacctgaatacattgagccactgcgggaagaaatcacacggactctgcctgatggctggtatcggacgactcaggctgcgcttaaggagcagtcccgtctggacagcttcttgcgcgaatctcaacgcttcgctccgcctggtgaatgtgagtatcggatcttttcttatggctgcgccgtataaccagtcagggttagtgtgttagtatcatgctctaatcacctacgttgtctagtgaacttccaccgcatcgtcaaagaaccaatcacgctccatgatggcctcgttcttccagtagagacacacgtctgtttcgctgccggtccgattagcaaagacgctgtcttcgtcaaagacccaatcaccttcgacggctttcgctggtgccattaccctcgggatcgctttgtcctgacccctgagctcggaaaactcgacgctatgctgaacggtgctggtgagatgcaggctgaaaagtccgcatcttccgcctatttcgtttcgatcactaacaccaacatgcatttcggcttcgggctccaggcatgtcccggtcggttcttcgcatcgaatactttgaaggcaatcctgagtcgcctcatccttgactatgaattcaaattcgttgaagacctgcaggggaagagaccccgtaatcttgtggttggggagcatattcttccgagtatgactacggagatgctgttccggaaaagacctattgggctttgagtagaaggggagatgttacttttcagggctaccagaggtcgatgcccgatgccatacttattctaccaagatgttgcggttcttgctttacatctaaatatctcagactaggaaataagaatattgagtttgatttcagttccatcgtacagtcatctgcaatagatataagcactgccacgacatacatgtcgagacggggcgcagatatctaaagcgtccacatacatagagggttcgaatccaatcgtttcatcatatcttctctcgaatatcacgtcgatcattccctaggcagtgggctggggggcacctcctcgcccacgacctcctctgccacggaacccattaccacgaccgcggccacggccacgtcctcggtccaatccttgcggcggcggaacgcgagagtagttctgcggacggaagttggggttgttttggataataccctcgctgggatcgctgttgtccattgcgacatatccgcctcgcgcacctccccgaccggcacgggggccacggggaataccgccaccattgggacggaaaggaagagtggtctgttggccgttgttgagacccccgcgacctccacgtccagctccattgccttgtccattgccttgtccggcgacagctcctcggaaagagcctctcaggggcggaggggcagttgcgttcctcagttgtccctgtccgtgaggaccgatgggtgcgccgtatccggcaactgtcaaaggagtctgggtttgctgggtttgctggctagctgtggcacgggaactagtgatcagttgtcggttggagatgttgaggagggaagatgctaaaacagtttgaccacggaatggtgagcatcgaccacctagcgtagtgccgctcatgaacgacacatcaaagacaacatcaagcagaagtgctcgtggggttctggttaaaccgacaacagtgccacgagtagcgattggcaccttaccagaatcttgggcatacacaacccgatcaccaagctggaaggtttggtttccgaggcggtgctcgacatcggcaggccgaaggagtgcactacggggcacaccccgaaccttcttcggttgcatatctggctgggacgcattgagattatcggcatcctgctcaatcaacatcacaatatccgagtcaagttgctcagcatcgaggggcactctctcgaagttcttagcttcaatagatttgagccaatccttaatctctttcatcttaagggcggcgatttcctctggatagaaatcagtcggagaataacggtcgctttgagggttgcgctggattccagcgatgaattcggggaatttaatcatgtactgttgaagcagttccactgccttttggctaaattcccagccagattgtcctcgacgggagtatccaagaaccttctgttgctttgcctggaacttcaggttaagaccgaggttcgcacgttggccttcgatatcaactgtaaaggaagatgtgatcttggctaggaccaaaggattgaggcgaagactgcgcgcaacagcgtacgaaggcatgtaggggcagagttgctcagatgccctaacacgctctcgaccgaattctggctcccgacccttcacagccgcgaccaatccattcacctttccgtcttcgtgtcccccaacataaacaggtcttccatagttgaaatcacccaagaagaaggcacgagaaccctctgggaattcttcttggatagagagagcttcacgctcaataaaacgttgatcaggattgatcacatcatcaacaacaacctgtagagcataatccgtctcttggccgggaatatcagcgaattccttgattgtggctccatcgtctgtcttgctcatgcccttcagaagttgaatgtggaccagagattcgacatcgccaatgataattgctagacgcttgctgtaggtgccctcaatcttgttggccttcctcttccactgctcaatttgctgaggggtatgaggaatagataaagggtgttgttctccaggaggtagaacataatcaaataattcatccgaaacgcggaccacaagagcttcttgtaagaatggataacccacgtgaatacgcttcccaagcttcgtcttagccagttcaatgctcgaccggcttcccggatcaaggagtgtaataacctggctctcgttgcggctatcttgattgaacacgcaaacgccatggaaacctaattgaccatggtgcggaagtgtcttgatgctagggaagccagcaagcgctgccttgcctaagtggacgccgtccattaagccagcgtagggcaccaatccatccatgacggggaggtcaaagaggttctcaatacaacggcagctaggaagatccgggaatacgccaggcattgaggaggggtaaatgaagttcacttctggggaataggtgaatttgagacaaaccccaaagtcgttccttgctttttcatccgcggaaagtaggttttctttcgttttgagggcgtccaaaagccgtttttcgtcgatgaatggaatcttgacaacggcttcccattccatcttttttccgttcatatccagatcaaaatcacgggggtagaaatcgtagatgggggaatcagccgaggtcatcaggtcccaatacgcagtaggcacgatcttcttgctgcgatcgggcaagacacccataagctggtcgaacggccggaaaggctgtcccaatttgaagtccatgtctgcaccaagaccatcattcacatctgttcaaccgttagcaatcagaataatccaacaagaaaaaagggggattgggtactactaaccagaaatcataggggcatagtggtactggaagaaccaaggccaagaagcaatgccacggtaatagtagaacaagacccactgcaatccttgcacgtagttttgcgccaacttcttcatctcttctttgttatcgaggccccagccgaacttggtccgataataattatctttccactctaaaaacttggcatcatatttctcctgcgcggacttctgtgcttcctcggaagtcatctcttgaactttggccttctcgtacttccgaataatacgctgaacagccaccgatgcctcttcgtcctcttcgtcatcactgtcacactgggttggaggcaatgtgagtctcatgaatcgatcaccgttctcgttgtcgatggaggaccaaggcaaccggagctcatccgcaagctgttcgacgaaagcgcggtcacgagctggaagtgtaggagggaggtcaaggggttcacaggtcttatcagaccggttcagaacgtacttcttgaccgtcttaagtatctccttctgagcaggagtgagcgtaagctctttcttctgttgcgaggtcgaataatcaatgcttgggtctttcttcgatttgatccattgggcatcggagttttcagcctcaaagaatcggtattccacggcactaagcgcagtcacaagcatgcccaaccgttgcacgttaataacaccctgctcgttgatgtagccgcccatttttggcagcacctccttgtagagcttgaacataagggcaagggcaccctcgttgatatgtaagtttggcaggttgggcaagaaatcgttgccgacgaaaaaggccataagaatgaaatcatcaatgacacgctccatatcgaatgggaaatccagaacaccatcttgttctagctcttggaattctagttccaaatactcccgcaccacgctcagatgcaggaggtaaaagttttggtgttccaattctttgggcttcttggatacttggcgaccaaaggtcacttcctctcgaagaagacagaagtgagggtcatggctgaggagacccagcatgatcagatcggcatccagaccgtaaagacaatggcgaacgttggattcatagtcgggctgcgctttcgagcagcgaatgtattccataatcttgtgctcgccttctccgggaacctcatggccagaaagcacaatttccacaccttgccaatctgtgtcctccgagattttcttgttgatgaagtatttgagttgtttcgtcaatttctgcatgaactcggtacccggggtgatgcagttgctgtcaaaggcatcttcctttggcatctccaggccctgctggatagccttctccttcgcattctctgcatccagggccgtccggaatcgacgcgcacgttgttgattcatcttagcgcgaggcgcaacaccgtctaccgccatgtagaacagtttcttgggcttgattttgccaaatagatgttcaatgtaattgaagatggcaatgaacatttgatcctccgtcatgcgaaacgtcggggagtcgctgtcactatgtgtacagttgtgaataataccgttcatgtcgaggtataggctatcgaattcgggtatccggctctctgcgatcagcatcgagattgacggataccgctcactcagccaacggaagaatttcgggacacccatggtgaagattgggtccgattgaagcgaaggtcgccaataaagaaatcggcaggtgatgtatcgtaatagtttaaagatcgtatgaggggttcttggaaaggactgaagtagagttacttgcgacgaaaggtgaaatcatccaatgaacagatcttggatgaggtactgcgtcaacgaagtggtgtccaaagaagaatataaaaggacaaacgtaaacaagcaagagaaaaaatatataacgccggactgacgcttttcggttgtctatgatgcgatgcgagacgtagtccccgcggcgatgcgatgtgaacattgaagagtcaaccccaagctcattcaccgcctaccaatcaggtttagtgccattacgggtctctcagcactcattaacgcgcgaatgcgcgtagctttcctccgcctacctatctgcttcacacactctttctaagtggctgaagttctgttatcttgtgatcttattatattgcttgatcctataccaccccaaagccatggatccctatgaagacgatgctggtgagcatccatgaccttgcgcactactcaaaaatctcattctaatgaagacctaggtgctggtgacgagcacgagaaagaccaggatcaggaccaggaccatgaacacaatgatgagaaggcgatcaatgaaggtagctttgctcaatctctccagttctgccaaccacggtatctaattatattcattggtcacagagtacaaaacatggaaaaagaatgcgcccttcctctatgatatgatcctgagcacagcattagaatggccaactcttacaacccagtggcttccagataagcaagagtatgccccgaaaccctactagtcccactggtccaatcatcaacctaaccacggctatcttcagagtcccggacaagccctactcaacccaccgtctcatcattggcacacataccactggtgaagcgcagaattaccttcagatcgctcaagtgcaactcccaaatcctaatgcgccaaaccccgaagactatgatgaagaaaagggagagattggaggttatggtgggggctcaaagaaggcacagatggagatcaagttcaatattgtgcaaaagatcgatcacaagggcgaggtcaacaaggcccggtatcagccacagaacccaaacatcattgcgacaatgtgcacggatggtcgggtgatgatctgggatcgttctaagcaccctagcttgccaactggcacagtgaaccctcaaatggagctcctaggccatgaagctgaaggcttcgggcttagctggaaccctcatgtagccggtcacctcgcgacaggcagtgaggataagactgttcgactttggtagggcacagcatgaaaacccaagaatttggtgtgactcgcagctaatgaaggtcaccacagggatattactacatacaccaagggcaacaaggcagttcggcccagccggactttcacacaccactcctcgatcgtcaacgacgttcaataccatcctctccactcctctctcatcggaaccgtctccgatgatatcacgcttcaaatcctcgatacccgccaagaagactccactcgcgcggctgcttccgcggaaggccagcaccgcgatgccatcaactccatttccttcaacccggcttccgagacgattctggccacgggttccgccgacaagactatcggtatttgggatctccgtaacctgaaatcaaagctccactcgctcgaaggccacaccgattcggtgcaatctatctcgtggcatccatttgaggagtcggtcctggcaagttccagttatgaccgcaagattatgttctgggacctcagccgggcaggtgaggagcaaacacccgaggatgcccaagatgggccaccagagctgtaagtgaccacgatttgttttcttcatgcaatggtttgtattgttcgctaaccttgctccttagtttgtttatgcacgggggacacacgaatcgaatttcagacttcagctggaacctaagtgacccttgggttctctgttccgctgccgaggacaatctactacaggtatggaaggtagcagatgcaattgtgggcaaagacctggaggatgtcccaacagaagaaattgaggcgtagatattatttctaccggacttgcagttgtctcatcattttccatatggctgcttctttgatatagttgaatcaagaccatagtgagtaatcttaaaaaacactatttcctttgaaatctatatatattcttgtgcctataagggcatattgttacccatggccaccaccaaccatgatagtctaactaagttacatggcatttataattcttgtagactcgaggaccgcttagtgatatcagcattcgtttccaacattagtcattaattactaataacgaaggacctttagaaccgccgaaaatcgatcgctaaaacatccaagcagtcttccgtcgaacacattgattaacacacgtctgatcaagctccttatccttcgaacgagtcatatatatacgtcggtgtacccctgagctaacttaggtttcgtcagtccatatgactcgcttctaatcgttaaccttctagtaagcatgcttgagcgcaaaggctattcgtttagtacggtctctttccgataccacaggcttttgtgtagtaatgtaccggcggataccatggtatttcaggaagcggcgtagtgttcgtggacaaggcagattcgttacagtggttacctctgctattgtcatcctgcgagctgtggtgtcttgtcggataaaggccgtgattttgttcaataactgctggcctagctagcctagtcataccagtacggcggggccttccatttagataaataacacgccagaccgtatggtatctgacattaacctgcctcataagctgctggtatgttaaataccatactgtctggagtattattcatctaaatggaagacctgtggcctgtactgctttggtcaagctcgtttcggttctgcccgttactgtggtgacattcaaccttatatataccgagctccagaagttttgctacgtacaacttgggatgaaaaggttgatatttggaatctcgcggttctcataagtaggccatcaactccatttctggacaatgcaactaactcatccaaacatggaccattttccaacataagcaactattttatgccagagattcaaacaagaaacaggcaaacgcttaccatctcgctgagatgattgcgattcttggaccgccacctaaagaaatgttagaacaacgactatgctacagaattctttgatccagagggcacgctatccctaacatctacacgtcctgtcacaaatcaagcaattcaaggtcattggaagggagcggcacccattccatcaaccaccttagagcagcgggaggaaattttgcaaggtgaagagcaacaactctttcctgccttcatgcgcaaaatgctctagtggcggccagaggaaagaaattttgctagagaattattagcggaccagtggctactttcgccataattgaatagggccatttccggttgacagtcttgaatttataacataaatacatagatagtaggaatataataagggtattgatatgtaggaaggcggtattgaaaatccaggggtgcacggacccagtagctggggccggccccagaaaatccagtttatgcataaattacgtcttggcggtcataaacatataaaatctgcagaattatgcacacaattagcgtgtttgcatggtttgtaacccaatttggggtcagattgagttgggtccgggtacgagcaacaattccctaaaaaaatagttctctctactaacgaagcatctgggatataagctagactatgctcgaaacaatacaccgttatatgatatctcttaatagattatgaacctgaatcaactgacttagctcgagagtaaaaagtagaaaagggaagagagagaagcatagcagaaaaaccagcttggttattgattgaaagccggaaaaaactagttaaagggcaggtttgccggcctagattcgagagacatctcttaataactaatatgccgttgcttaacggctattgtattgtgcgtgccatcttcatgggggtgggatttatacaacacattttcagcttcatccataaaagcaattgaaatcacatcctctgtatctgccgggtcggtttgtgacttacgcgacctaatcccactatgttcgactattagcttgacagcgaaatggaattgaaggtttctaaaacgaaacgaactagatttgatatcctttgactctctcatcctggttccatatctgtcaacactagaaaatagtagaaagtggcttctcactcacctccttttctttggttttaactaatttcctcaaagatgatacccagggtctaggaacatgttcatgtgtgacttttctaccagcgtggcaagccgtgcaactgttgcagtgaacattgttgcaaaagttatgcaaagatagataaataaggtggaagacaattgtctaagatgaatgaaagtaacagacctaatgatgtccttaaccgaacgtgggaaatggtgtgtttttatacacggatcgattcttataatcaagctgtatgtctccggcatctgcaccaggatcctggtccttgcgaggggcagtatatttgatgttaattgatattagtatataaataggaagcattctctacgagcgggttcgatgtggttgcgaaggtccgcctagtacaagaagcgaaaagtgtaataataagccccttgtcgtagtccgtgcggccgatacgagcgctggtcgataccttgtctgtggcttttacgagactaatcgataaagcacaatcgccaaaagggaatgagatgattgggcacgaatgggaacggaaagttggattccctaggatctgtcatcataataccaaatttgcatgctgcattgcacgtggcgtgcctgattccaaacccccgtctgattccaactacccatccaaccttccacctgagtcattttctctctgagatgagtaccccagacatcccgatcaggttatatctatacggcaagccatttgactggtcggaagatgggttatttctgaaccagctgattgtggccgaaaactatttgcgatttgcacttaagtcttttgagcaaaagcggaaatcccacgttgatttacgagaggccatatgaatcagcaacatttggcgtagtataagacggagatacaccagcaattacggttatcccgaaaagtgggaacgcaacgcacctatggtcttaggctgctctacgtaagacctacattccaatcatcaatttgttgctaataaattagtcagtatgcgttatactactgttggaaagcccacagtgctagcagagctcttgatatacaccgcgatgcagatgattccgcgctatgacaaattgtaactatgaggagattggggtcttttttacataatttgacccttagcgaatttgggacgcagtatttagatacctgggggtttacagaacttcaccaaattctacaggattatcttcgctgattaagacgagataaaccctcattaattgcgctgatactcgtagtagaacaccgctcatatgggcaatttggctggtttcgtatgtagatcctattagactatgtatggtgccgatcgctggatgatcgccatgtgagcgtcacggaattaactaacttaaataggttagtggcacttatagaggactaatcataaatctagaccaatcagaaagctgttttgagtagtctcgcggcctggcccgttcatctcgttatcctcacctcactttgccatcaagtggcaccaaaaactatcatcatgattacagagatagccctgctacctgatactctcgctttgcagcgcaatcaggaccttatgagggaatttgagaaggcactcgagataaatttagcagtcaatttgaccactctcatccctgattcctatttttaaaaatatagacacacaaccacaaagtttagaaacaaaaatagccaagctcaatcaaaaaaccgtcaaggaactataggacccccttagaaatgatccaaaggtgcacttgctttcgatttcccccaaactatgctcgtcgttggcgattcgcaagccaaaccagtgaaaaaatagcaaagcctgatataatggaacaaccgaaagttccagactttcggatatgtcttgatagtgtggagatagctgagatcattttcccactttcgaaagatgtgactactatgctagtgcccttctcggatttttctaatggaaataagagtactgagtagccgctactcttagtaccgcgacgaatgctttggaactccaaaaagttatggaaaaatccgatacggggcattgtcgtttaatgcaattataatattattgcaaaacctatcacgataaacggcaactacacagagtatacggccttgcgataccttgaagaatatgttctggaaattcctgctcctagaccctatgcctttatcaaattcggaactttttataagattttcatatcctatattccgtctatgacattgagcgaagcatggccgtatctcttacacaaagagaagatttctatgaagtatcagctagatgtcatctttaggaagttgaggattgtgaggagatagatggccactgtctgggaaggttcggtagcgaaggagtaaatggacacgaaaccaatagaatcgtcagcacggccgctggatttgaccccccatcatggcagcactacatacgcctctttcctccgctcttttctcacagattctgttaaagggctggccttggcccatggtgatattagacaagataatatcatggtgaagctgaatgaagacaatatctgggtagttactgagatcatcgactgggaagacagcgggttctatccgaagtaccacgaatgtactcaactgaccaggacattgagtaacgaggaagataactggtatctctatttgccagcgagtatctcgccgctgcaatttccggtacgttggcttgttgatcgactttgggatatccatatcaaaaccacctagttgagtctccgtgtttgaaatttatttatatgtgtgctccccttcctctacaccatggacagaaacatggagtgtcacggagtatgacatatatctgcagtcagactcattgttatagaaatagcataaagattaaaccaagattagtttcctcaatccgcgatccttacagactttcagcctatcaggtcacaccacatcacgtgatattgtgctcgtacacttaggaaggccatttgcacagttaaacttcgctatttcgaacttcgagcacaataatacgactaagcccttgtctaatggtgttcggtcctgatagtagtgttgtagacatataatgactagtataatgactattcgcgtagagctggatctgtcctactgtctaagtagctagtgagctggctaatggcatttcgtctagcactcaaaatctgcagcgatctgacttcttttcaagattttgactctttgtatgcataatgtatgtacaacatactactcggccccgtagtccgatatctgcccgcggggagcatgtcatcattctggtcggttttgattggtgctgattggtggggggcgatgaggggacaaaagaaagttagtgtcgtttgctgaaaaaaaaaagtaaatctgatttccgatactcacctcgtttattattaatatcatcttgcaaatctgagaaggtgacatatctgaacttatatcaacatccaacttcatccttgaaacgtctccatcatgggttccgattcccctacaagccccagggcctcagccattccgtcccacatgttgaacggcagctccccgctgcatccaacgggcagccgtcattctcgtgagcgcgagagtctcaatacatccattcgttcctcttttgagcccagaattccccttgaatttgaatctcctcagaccaagaccgagaccaagaccgagaccgaggccgaggccggaactgagactggagccgcccccgcccagtccgtctccagtgcctccgtgccaattcgcagcgtcgcgccagtgcggtatgtatacagcgatataaccattaatgataatggtgctttcgattccgttgctaatctctgcctagtcctaccttgaatgaccctccccgcgatccccgggatgaggccgccccattgacacctgtagccactgtcagccggccacagagcccctacacattgacccctcctatcgactttgacggtctcagctggccttgttagtgataccacccctctcggtggacgccactgtattggtaaatgtctctaatcaccgtcacctaggccccggaacaagacagcggaaggagtcaacaccggaggagaccgcggaacggcttgaaaagatgtcaggagctgtccgaacaatcctggaatgtattggcgaggatccggaaagagaaggacttcgtgagacccccatgcgatatgccaaggccatgctttatttcaccaagggctacgaggagaatgttcgcgatttggtcaacaacgctgttttccatgaggatcacgatgagttggtcattgtcaaggacatcgacgtcttctcgatgtgcgaacatcacatggtaccattcaccggaaaggtaaattgccgcagatatcgatactgtgattatattcattctaacaatttacagatgcatatcggatacatccctgaccgccgtgtccttggtctatcaaagctggctcgtctggcagagatgttctctcgcagactgcaggttcaggagcgtcttaccaagcaagttgcgttggcgatttcggaggtcctccagccccgcggcgttggtgtcgttatggaatcttcccacctctgcatggtcatgcgcggtgtgcagaaggttagcagcaccactactactagctgtatgctgggatgtatgcggtccagcgccaagactcgcgaagagttcttgactctgttgaaccggaggtaatgccccatctcgccaaccaacctaacacaggttgttgatttttgaatttctggagttggtggctacctttcaacaggttttgagtggtttgcttttttactttacatcttaagcgtggattggtgtttctcttgtcttcccttctctcggttcttctgcacatactcaggcaaatatttgccctggtatcttgtcatgttcctcgtccatgaagctcacagccttcttctacgggaaatggcaaacacccactttctcgacccatgatggtccgaggaagaaaatcaacccccctcattccctatcctatatgccctttcccctaccatactaaaacaatacctcaagaggcctttgctgtacaatctattgagatctcactcgatagtactagcaaggctgtttcaacacttgatctcatgccgcttacgagcatccagtaggaattctgggagctatccacttagatacaatgtatgtattagaaccaatgtacttattagaatcaatgtacaatctctttctaattaatctctctcttgtttcctcgttgagaacagaaagacaaagctctggtaatggtgtgttgatgtccagcattgaaaagtgtcgagctggaaggcctacaactgatttttatagagctatctggtctctcttagggcttttataagactactcaagttctctaatgcttcatcaaggacgaggagtaatgtctaccacctgcctaggtcttgatgggctgtcaggtagttctggtccctgagtgacctcgtccatttgaagataggtactgccagaggccccttcaaactacactcctcagcgaggacatagttggcggtgaatgactaccagttgcacgtgcaaaggcctctcacacgtgcaccccaggctcgcttgttgtttatatctagtcctctcgcacacacactcttcttttccttcccatccctctcgtctctactatcccatctctccatccatccattgaagtctccattctaatcttgctctattcatcttcatttcgtcctacaaactattgattacttctacttgcgcttcttgcacgttttctgctactttttctacttgacgcacttgtgcatcatctttccaatcctacctctcaaggtctcttaccacaacacacgacgcgtcttccacggtcactaaggtgatatcggtatcatctatctctgtaagttgtctgagtcaatcctggttccttgatatgtgctgtacacaacactgggctcctatgcatatcacaggttttctgaatgaaagtgtgatgtggcatttgcttgtctattgtttactatcattattcttcctgctatgatctatgaagaattatttggatgtatgaggcgcgtcactaatcagtttcctaaaaaaaggttctcgcgttcaaacctatcgaacaccctacagtgtacctgaagtgtttgccctaacaacactgagcaccacaggtatatgaaacgcgtctggttgaatcaagcatgggacttactaacgtggaagtaaagggtcaaataatttatttgaacacaatggagaacgacgctcagcgctcggccagtgatgactcttcgagttccggtctctcttcccaggatgatgaccacgacctcgcccaacccactaccatcaatactactaccgacactagatcctatttgccctctaatgtatcccttgaaattctccaggcgcacctagacgctgacggctctgactcttccgatgcttctggaccgcgggtacatcccgacttcttcgtccatcttgaaaatctacgaagggtcaacgaagccaatcgagtcaacgcacgcagagatgctgaagcctggtatgaagctgcgatggggcacccgcctcagcatcaagatcctttgatgttcaacgggtcccagcatgaagcccctcagatgcacgatcagcctcagcatgatgctcctttcatgttcaacgggtcccagcatcaagcttctcagacgtacagtcagccccaggatggaactcctttcatgttcaacgggtcccatcatgaagcctctcggatgcacgatcagccccagcatgatgctcctttcatgttcaacgggtcccagcatcaagcttctcagacgtacagtcagccccaggatggaactcctttcatgttcaacgggtcccatcatgaagcctctcggatgcacgatcagccccagcatgatgctcctttcatgttcaacgggtcccagcatcaagcttctcagacgtacagtcagccccaggatggaactcctttcatgttcaacgggtcccatcatgaagcctctcggatgcacgatcagccccagcatgatgctcctttcatgttcaacgggtcccagcatcaagcttctcagacgtacagtcagccccaggatggaactcctttcatgttcaacgggtcccatcatgaagcctctcggatgcacgatcagccccagcatgatgctcctttcatgttcaacgggtcccagcatcaagcttctcagacgtacagtcagccccaggatggaactcctttcatgttcaatggatctcagcatcaagcctctcagatgtacaatcagcctcggcatgatgctccttctatgttcaacgggtctcagcatcaggcttctcagactcacagacagccccggaatgaaatttctttcacgttcaatgggtctcagtatcaagtttctcgggcgtccaaccagccccagaatggagcttcttcttcagtgcctaaccaaccccagaacggaagtttccaatttgccaacgaaacaaaccaaccttcgtaccacgccggtaccggaaatggattgcagccatcggcgatgggcatgcgtgagcgatatgaaacccaagattccactgcagccgggccatccgagccgtcgctacatgttcggtttgcgacacctactcacattggtccttctcaccctagagacaatcctcatcagcgtcggcctccttctccctaccctgtggggttccgtcgcccatatgcttctggtccaaattacatgtcaaatcctcccttgccaccgtatcctttgccctcacctcctttgccagtacctcctgtactagcacctcctgtgacagcaccactgcacccggattataccgaacacgggaacccttacagactcgcatctgagccagaattgcttcctgaggatgccatcactcatggtgaagaacgcattgttcaatcatggctcattcggcagcagcttattgccggaattcctcctcgggaaattcagcccatggcacaagcacgcgaaagacagcaccgaacccctccttacatcatgctcaatgagagcggtgcccatatcataagaattgaacctgcccgattcgagggtgccatgcttcctctcacaggtcttccttggctgccacagcgcgcaaattctagcgcgccagcctcatcggatgcacccgatgcttcgggtatgcccactggtcaagaaatcgcgactggttcaagcttatctagtactctgaactcgccgcttgacccaaacttgttgactgcaccaagctccccgcgcggcctagctgccgccaactcgccggttgcttcgcaccttccagctcctgcaaccccgccaactgtcccaactctcccggttaattcacgcttggctgaaactccaaacttgccagtcaccccggactttccggctagtcgaaatgcactagctactacaactctgctggctactttcactctgcggcctgactctactgtttcggacccaacttctgtgccagaacaaaattcggcgaacccaaatgagcatgtcgcgggaagtctgaacccggatccgcgtatggtggcattcttccagcctcttaggctgcatgaaacgacccattccgtcttggctcccgcggaaatgcgcgtagaagcaccaggcacaacccaggtcggcgccaacgagaaccgtcaaacttccgtggctacactgcagtcgccgtcgcagggcggcatgcccctgactgtgcagaactacaccgatgctgactccatcggttccccgggggctcctgggatggtcgtgtctcccgcccgctctcagggccaagggtcctctacggggaccgacaccgacaacatgccttcccccggggccccccagcttgcgctggagaaccgcgacgagccccccactcgtcgtgtgcatcggttcgcaatcgatggggtggatgagtcggccgaggtgggccgattctctgcggaagcctttgcttccggtgatcaatcctccgggggagggttgatctaaattttcaacgtttgtatgagtgaggcctctctgaggcgaatagtgcttacttcgtgagcacgaagtgaacggcgtgtgagggggttgtcaatctctgaaaaatgagatggagtatatgtagagtattattgaataaacttgtatgattacaattgtttcccatagtaaagctactaccaatgcacgtagaagcaatttctttgtatgtcgtcgcttgatcaatgtaccacggcaggtcacagctgcctataccaatgagcctgatacagaagatgagacaagtttccacgcgcgtcgcaggcgtttccttaccaatagagcgctaggcaaaaaataatactttgcactactggggctaatcccaagtcctgcaatgataggactctccatcacatcgacccttatgcagatgtgaaccgtcctatacagcttaccttgaaggactttgaccccctcataccgctccagctcgcctgcctcgacttctgtatcgagctcccgaaccaagatcgatgcgagcgaataggagcgcccactacttactgctctagctgtacagggtctcggactggatccaaattgggattagcccctgtaagagtagtgaaatcgctgtgacaatagtactgacacagatattgttgcgaagtgcggtctatttacgtacatacagggtcacgtgacctacatgtgaccccacgcccagttccggcacaacttcaacatgcccatgacatcaacctacctctttgccttctcggttcctcgctaagctgattcggcgttgcgggcatccctttatgcatactccgataatatattatgttgaaactaagtccctagtttttctggggaatgttcctttttttcgggtatgaatggccggatgagaatggccgggggtttgtgttccagcccatcccgctctatctcgggctgactttcaggccacgcccttgagttccctgcaaccacatccatatcatgagatgttgctttctcttagattacaaactgtcgatttttggtcctgcaattgatcttgctatttaatatcggaggcggggtgggctgcgcgcagggcctaccaacaggccgcacctttgggggcttgcgcattctactgcattgtactgaattggggtggaggaaccattgtttttaggctttttctgccttgacctctcgtacattgacctcattcggtatgcttcccacattgtcgccggcatattgtttggtcaaccgacttggagacctggacatcaccaacatgaattcgcacccttgtgtggcaggaccatgaagatgcagggcttgcaaatgttggcttgaaacaacatggcgaacagatttccgcccgtgttccatctctgtcccggtggtatttgtcccctgatagtcaaccacgagtctatctgttgtaaatcacgacaaagcttcattccaacgcgcacttttttcctggttcatgatgacccggacttcgacaactgaccaatctacaccttacaagacatcgaagaactgaatggctgggtgtcatacagagcatcaaagatgtttgcgacaaagaatcacagcgtgtcaattcggtccttgaaattgaccaacagctctatggtcttgggaaagaatgataagagactccagccatttatttgatggtgtgacctgataatccaacggggattgtcctggtgccccgggaatgttggcccatctggccttgtgcaatacgtagatagtttcattcgtgggacaacccaacgcagtctcagtttggctttgtcgaaaacaggctgctgtacaaaagggcatggcgagcacaaagcagacaatatgctagcaagccggctagcatgcctgttttatccgacacctgggcaccacctgatcagatcatcacgtgctagcagacacagactggacacattcggtatccaaaaagaaactcggagagagcaaaggagaagtacacgttgcacttatcttcgacatctgcacgccatcccccagcatccaagtgtcgaatcaagttgtagagccgcaacactgatcagtcatcaatcccgaggtccatgggtttctgaccttgaaaagcccaccctccacggccaagtagtgttatttctttacctgagaggttgagacaggtgtatatgataaatctgaactggtgcgtgtgccccattcaaccctccccttgcttatgttttcgttgttcaccagcgcttgatagtgtacacagttcggatctggaagaactgtcgttccgagtcccccaaacccgaaagacttccgcctgcgatcgcagacacgctcgaacgccatcgctcgctgcgctttctcatcattatctctacttcaacgcctcttccaaccactggccgtgctcacattatctatttcgccctgattgagccagatgccgtttgcgacgtctacatggctgggtcccgtacgagtccggtgttaagagaccagtggagcgctgacccagaccgtgatccccgcgacatggatagacggagaggtcgagggtcaggccgcgatcgagggagaaacagaggtcgtgaccgaggccgcccatatcggcccaataaccgcaatttcgatcgcctggggcggtcgccaccacgcgcgtcccgctttggccctgactcttctaacggcatgggtgatttcgctccagatcgatctcctcctcgaggttctcctccacctcgtaactttcacaacaaccgtcgactagatccaacccaaccagtgacaccagccggtgactggaatgcccatacttctggatcttttgacagagaagaccccggtcttcgaagagacgagtcagcaaccggacctccacagaaacggcaaaggactcgaagcccatcaccgcgtggcggtcgtggccctctccctcccccgcgtccaaattactccgataattgggatatccgggatcgaagcccctcattcaagaaacgaggtggccgcaaccaaggtcgtggtgctccaaggagaagatcaccacgccggggccgggaccgtcgtggaaaagaccgtcgtcgtccagacatcccacgcccgggaaggtctagatcaccggttcatgaacgagggttccgtccttcgcttgatcgacggtctcgcacccctggtggtgacaatcacagcgaccacggatctcactatcggtcgaactcacagcactcagtacggtctgcaacctcgagatattctgaatcttctcgcaggtcgaggcgtaactcggcgatgaacacaaaccgaccaacccaatccgttgtggacgatactgctcggcctgcatctccaccgcgcccgattccaagttttgactctgataacctcggtgatctcggagaacaccgagatgagttgccaatacatgcgatgcgctctgatgggaataatcagtctcgccatcggccgtctcgaccacatcttgatagccggccctatgcagacgctcaaaacggaacaacaggctcgtaccccggttcgcctcaaccaccttcaccttactcctcaggaagaggaggatggtcgggcccgcctccgtgagtttttggattgctttcacttacatgttacattctgaattatactaatcctctcttcaagtcatgcctccccttacaggaacgatgactattcatcgcaaaatggaaactattatcacaaccaaggtcaatttaacggccctggcaataatcgcccgcaatctccctatggcgggcctcctcaccgaggtggccactctggtggcggtcatcgagggaacttttcaaaccaaggtcccgatcggagattttctggctctggccctcatccataccataatggaccctcacaacgcggcgcgagaagtcatttcaacaacttgcaatggactgcttcgggatcacgaggccgtgggggacaacatagtcctcacccggcgcacatggatgggtcacaaactcccagtcgaccgcagtcccacaatgaaccgcaatcaccccgagccggcgaaagtgaacatcatcattcccggccccccactagggatgaagagatgaaccaggcacaacctcaatccgccggcgggaatcccccatccatgccaccccaaactcacgaatccaacgaaacaacgccggcaaacaagggcggcaaatttagctttgctttcaagtcaaaggctgcaccttctcccgccccaaagccagtacctgaccttgcccagaggatgttgcaggtccgcgaaccggcccctcgtgcaccggaaccaccccaacaacctcgcaatcggttcaccaatgggccattgcccagatttaagccagactcaagggctgatcgccgtgaccgagatcgtggacgaaatcgggatcgagaccgcagagatttccgagaaccacgagaattccgtgatccacgggaccgcagagatgatcgccggttcgatcaacgtcgtgatcggcggcaaggcgaacggccaccggacaggccctcagactggccagatcgtcgccgtgacccttctccggaaccgccaagagaaccatcaccacccaagcaaaagcggattcttacccgtcctaaaccacgtcccacaattcccgctgagttcgctaatgccgaatctgtgtactaccgaaagccaggaaatgagtctgtgatcggcgctgggacatatggaaaagtgttcaaaggaatccacgtctatacccaacgtaaagttgcattgaagaagatccgaatggaaggtgagaaggatggcttccctgtcacggctgtcagagagatcaagctgcttcaacatcttcgaaaccataatgtcgtcagcctcctggaggtcatggttgaaaaaaacgaatgtttcatggtctttgaatacctttctcacgatttgaccggtctgatcaatcatcccactttctctctgactctgtcacataagaaggatctggcgaagcaaatgttcgaaggtctcaattaccttcaccatcgaggagttctacatcgcgacattaaagcagccaatatattgatcagcaaccgtggattgttgaagtttgccgactttggcctggcccggttcttctccaaaagtcgtcaacttgactacaccaaccgtgtcatcaccatctggtaccggccgccggaactcctcctgggtgaaacccgatatggccccgctgtcgacgtgtggagcgccgcttgcgtttgcatggagatgttcaccaaaaaggctgttttccccggtgaaggtggcgaattgagccagatagacaaaatatacaatgctttgggtacccctaccaagactgagtggccggaccttgtggagatgccctggttccacctgatgcgacccacagaacgaaggaagcgtgtttttgaggacgtatactgcgatgtgctgacaaccggtgcgatggatcttatatcctcgatctttcgctacgacccttcaaagcggccgagtgcggaggatgtccttaaacatccatactttgtatcggaggaaccaacccctcatccgccgattgagtacgttttcccatgcccccgtttgtatatggcccctaataacctttgtctacagattggagcacgttgaaggcgactggcacgagtttgaatctaaggcgctccgtaaggaagctcggcgcgtcgagtatcagaaccaaaaggatcgcgacaagcgcaaggccgacacatcggtgcccagcagcgatcgggattccaaacgaaccaagcaggattcaagtgatcgtgtctctgcgcagtgatgactcttgcttcgcgaattattttattatttattttcttgctgttttaatgcatcggacatggttgacatgattggtggactggggatttactttttcacgagattcactaccctaggtactcggagttctttcgggcttgttcttgtcacatattgcccattgatcaataaaatttagatcaaagttatttgtatggtcaactatggatatcgaaactgtagattcaacaggtggatatcatctaggtaagctaatgcatgtcggttccagtccatcgggcactaaaagagacaccgatatagcatatcccaaaatatatttcaaggctcagactttgcctgttgaccgcatgctcgaccagcccgtgagcccggaggccaaagtagtagggcggttgagtcctcggattaccagagagctcaaaagagtttcttcattgcgttgaaatatagaaatggaaatagagatcgaaatggattgctattgaatacacgtaccctatactacatagacaaaagagacaaagaaaaggatgtgccgtcaatcaggtcatcaacgtttcatgggtggctcgtaagccctcgtgatgatggttttagatgcgatcatttaatctcgacacacacatcggaaacgccagtgctgtaaaaacaatgagtcgccagcgttgatttgagttggtggtcttgatataagaagaaaagaagaagaagaagacaaaagcgaaaaacgaaagaaaaagggaaaactggaaaaaagacggtgcgggctgcaggcgaaaatggggctggccgggcgctgattggccaggacagctgctcctccaaactgcagtcgagtctccgattcatgtcgacacttttccccttcacctgattccccctctatacctctgtttgtctgtttctctattgcttctttttactcaagcctcattacccccatagttcgattcttcccgctttctttgttttcttctttacctgcattactcccgaatttcttcttcttcggaatttcccatcggccactatactacgtcactgacacaatagcgccgacgtctcctttcgctgtgtaacgcttcttacggatccccttctttcccccctgatgaccgctcgtgtctcgggcagtcttctcacccgccgcgatggataatgcaaacctgtggacccgccggacaaagttagtcgtgtgcccctcctcacccaggtgaccattgtaacttatatggcggttgtttcttctcattagctcgtccaagttgtccctgtcaacgtccggagcggacgcgaaagacggtgcccgtgtcgaactgccccgcctatcgaagcgcttcggacccgacagctcgcatggccgctcgaatccattcaacgcaatatccccattgtccggcggagtttcttcgccatccaccaatgcatcctccgcttttggcctggggtccggcgcattcgcctcattcggtgcgccgaagactcccggtggctccgagttgaaaacacccggacgggagtcgcacttggaacacgacgaggccactcgcaaggcctttgagaaccactccgttgctgctcctggtgagcacccgttgaagtctacatggattgtctggtatcgccctccgacacccaaatactccgactacgaaaagtccaccgtgccactcgcttcgatatcttccgtagagagcttctgggcagtatactctcatcttaaacgcccttcgcttcttcccacggtttccgactaccacatcttcaagaaggggattcgccccgtctgggaagatgaggcgaacaagcggggaggtaagtggatcgtacgtttcaagaagggggtttccgatcgttactgggaggatctcctcctggcgatggttggggaccagtttgcggaggctggggatgaagtctgcggcgctgtgctgagcgtccgaggcggcgaagatgttttgagtgtttggacgaggattgacggggggcgcaacatcaagatcaggtatgtaaaaaagtctgttttaactcatcatattaccggtatatctaacttggttgcagagaaacgatcaagcgcctgctttctttcccggcagacactaacatcatctggaagagccacgacgatagcattgcacagcgctctgccatcgatcaggctcgccacgacaagactgccactggcacgggtcatcaagaacggcggcgtacaggtcaagatgactcggataaggtcaaagtgcctgtggccctataagaggatccaagattccagctggccttggcccctgtatagtaaacccgaaaaaaaaaccttcaatcacgaatcattgggacgcgtttgggtcttagggcggtggggcatcgaggcgaactaagcggtttggtttgattatttatgctctgtgctatgtgtttttctttttttttttgtgtctgccgagcttatgcgtgatgttttcctttatgtacgcaacatgaatgcagcattggctgctattggttttctcgcctggtttgtgtgatgacttggttcgtttgatgtgaagtagagcccttttcacttggacttggccgagcttagcgtcagggctctgacagatactccgactagaactatgtatgcacaagccaaacaaaggtaatagtgcatggtccggggatctgggtacaagaaccaatgtgcaagccagaagccctgataagtatgtattgggttgtattcacgctattgggtattagggcattgtgctattgtgttgaatagtatcaatccaaaaggtatgaacaaagtgaatcattcaacaatacaactgacttatctattcatctattgattgatctattgatctattccaagatagttagttagttatcaagaatgaaacctgcatgcctaaagcctcaggcgccaacaaatgctcaccgccctaggaccagatgacgatgcggcgtgcttgctccgatgaatgagaagaaaaaaaaaaagacaatagacaaacaatcaattgaataggatctatgcaatgcatattgtcatgacactgtggctgccttcatgcctgtgtttaaaaacttagtcgaactcttctctagcttgtcaccacgacgcaaacgtgagaccgaagatcaacgatctgctcttcaacgggcacaaccaccgctctcgacccctcctcgttctcgaccagctgggtctggtcgtaatccttttatcctggcacctgacgaacccgatctgaccgaaaccatttctccccagaacgctgcgatcgctcctctttcaacggtgtgtatctcccgctatctcgattctccatgcgtcttagccatctatgctcctttttgataactcgaccctgcacaatttcctcgcattgggcacttatctcttggctccgcatgttttcttattgcaaactaccttcgggtatttgacttgggactaatctctcttatcaggttgttcatagttatgtcgattctttttcgtctccaactggatctacaaccgcagaagaaccattgcgcacacgtttctcccacccttctctgagtcccattacccggttagacatgtcccgacgaaacccacagaactcccctgccggcaggccagagctgatgtcctcatccattcccaggccgggtgattcgtcgcaaatgttgaacaaggaccagcaaacggattcccagaatcggaaagatgaggctcggttgcttggaggcagataccagtatgtccttagtgtgtgtgttgagttgttcgagatgttgttgctaaccggctggctttttgcttggtagtgactctaacgctgtcaagataaagctcggagcatccctcaatgctcggaaaaagattccaggggtaagtttccgcctttatatgaatggatatggcatgtctaatcctcggtcatagtctaccttcgcgttctccccccgggacaaaatttcacagaatcaaaatacccgaagcagcgggccagtccgttcttacggagaaccaaatcaacaaacttcccggagaaagtcgccccaattcgaggatgagtttgaagagtcgaatcgacctaccaagatgcggcgccagagtaaaaccaacgaaaccgtcgaccttacggccccaacgaaatcagccagaaatcggttggaacagggactctaccgccacccaaatgcaattcgtcgcaaccgacttgaaggttccagggacgcggaggatagcgtcaaaggagctgcgcaaagctctaatcgtcctcgacatgaccaattatcttccgttgactctcgggatgaaatgtttaccgaaacagcagcacagcagcgacgaaatcaggcggattccaggttgtctaacgtaaatggcaaattaaaccaggctgcagaggccgttgttattgggagcattgaggttggaccaaagagagctgatcggaaccgcactgcagttcctacgagcatacatcgtcctgtcaacggcagagaaagtccagacgagcttcagggggatatcaccacacaaccagtaccgagatccttatcgggaacacaactccaagccactcgcccatccaaacccgagattcacatagaaacatcgactcgaaaacgctctccgtccgctacccgaagtccagacttttcgccgccaacaccggtcatgaagaaggctaagatatctcaaaagaactccgataagatacacctagtgcgatatttccgaatcggcaccttcggcaaatcttgcgattcgaggcaattcgtcccaatttatctaaccaaggatggctttgagcttcgtgagaatgcactcggccagggtaacacgatatcaataccttttcacgaaatccgtcaaattgtcgtcggcgagacgcctagccggaaagtgagaatcaaaatgttgcagagtgccgtcaaagaagacgatcagcttgacgttgagttctggaccaccgacgaaaagagaaatttcctggaagtgttgaaacaggcgaaacaggcccagcgtcccaccaaagatatgtaagttttgtgggctatctcttggatgagttcgcgattcactaacattgcaataggaaatggatggacaaggcgtttttgaagtatgaaaaacaatttccacgggagaacaagcggcctaagaagcggctacttgatgacttggtggacgatcccgatcctgagcactctcctcctccttcgcgacggcccaaactttccaagtccttgagagatgaccatggtgaagtcaacaatgtcaattcacttgagatcaaatgcgccgctcaggaaaaagtaaaacatggaaacggcaatgttgattctcgaacgtctgccaaagaacaacagaattctcgacctcttgataccgatagtggagctgatagtcgatctaccgttaacccacttgaacgcgagacccgctcttctacccgccgtggcgctaaaaagctgtcaaatggagacgttatatctgaagcaaagtcgaattcatttcccagggatgattctttcaggaaaaattggaagaaaccgttggtgtatccgcgaaatggaaagaagaaggctgaggtgacactcgttgatcgagaacggctactgagggacgacttcctgaacgataacctcattgctctctacatgcgcttcctccaggatcatcttgaacgcaccaacaaagaggctgccaagaggatctacttcttcaatacctacttctttgcgactctcacgaataccccacggggggaccgtgggatcaactacagtggtgtggagaagtggactcggaacgtcgatctcttcagttatgattatatcgtcgttcctatcaacgagaatgcccattggtacgttgcaatcatttgcaacttgccaagcttgtcccttggttctgctgacgccgtagagtcggttcgaagaccggctctccaaaaagaatcatccaatgcgtctgagagtgagatccaggaaattgaggagacacctgagccggaactaaggtcaaagtcagagctcaacggttctagtgaagccaaccaacctcgtgagattcgagagggatctgagaccagggggcagactgagggagatgagcatgcgatgaagccagaggagcagtccgcatccgacaactcacttccacccccaaatctctccaaattcgcaggccaaaagctcgcccaggaccaggccgcggcgtcacaaccgacaaccaaatccaagaagaaaagaagtgggttaaagttagatccgaatcaaactacgatcgtcacgttcgattcccttgatatgcctcgctcccccaccatcaaaatcctccgcgagtacatctgccgcgaagcggagtctaaacgcggcgtcgaacttgacccgaacgacgtcaagggcatgcgagctcgtgatatcccccttcagcctaatttctgggactgtggtctttatctactggcatatctagagaagtttgtgcaaagcccggattggttcatcacgaaggtactacagcggagcatgaattctgtcgatgactggcctccactaggttctggtctcctgcgataccgctttggcaagtttctcgatgatctatacgaggaacagcggcaagccggtgagcctatcatggcagtcagacggcctatttcattcctgcttggcccgcctcttccttgtcaggacgaaattgcggatgttgatgtggtacctgagtctcagcatgagacagattcttcaagggacattgcgaaacctgtcaattcaaagaccgaagactcgagcgaagattcaaccgcggagcaaatgcatctcttacctaccgaaaacctcccgaaaccaaaagacccgaaaccgaaaacatcaccctccaacccacctgcagatgcgaagtcgcaaaatgaccatgttgctccagcaaagggggaacccatcatccaagtacccggtagccaggaagagcccgaagtgccaggcacaccgtcccctaagaaaaaagaacgaaggaaacacggccattcgcgaaagagatgaatctgttcatgcaagtgatacagttattgtcaagacgatatcaacacagtaccggctggaccgggactgaccatcatgaatccaaatatgttcactattgatttagcgtttaacccatgtacgcagcatggcaaaccctgcgtcagcgttcgatgaaagaaggatggtgttgttttttcttcgtgtctttaatggtcatagcataagataccatcacctacatcgaaatgcaaacttaatgtcttttccgagaaaataccaataatatatgtaattaccactcactctcatccgcctgaacccaccacgccattttatccctcttaaacgactcaaaatcccactccgaatcctcaagcatatccttcccagcagtataaacataagtcatagccaaaacttcctccccctcagccgcaacctcagcgccggtcgtcgcattgagcatttcgcgcagctggttctcagcagcaccctcgctagaattaacgtggtcaccacccaccacagcccgcagcgtgcgcacagtaacccgtttcttctcatactccgatccctcaaatctgtccagtcggtgaacgtcgccgtctgttagtcccgacacgagtgttcctacgacggacgtcccagcgctggttttcggtgcagataaattggtctcggtttctgtctctggcaccgccacgatcccggggtaatcggcgttctgcacacgatgccgtcggtacccttgtagaatggcgggttggaagcggagcatggctttttgccagggctctgggttcgcctggccgtggatcactctgtggaggatttggggcgccattagggttcctgggtagtttagttctcggtttctcttgattcaagaaggacttaccgtagaagaagaggacgtggtcgcccattgtgtatggtgtggggtcgggttggttattgcgtggggatcgagggaggttccaagataagaaattctatagagcttgaggtaaggtaatatgtatattcgcaaattcagtagaagcttagagtataaagagaatcacaagacaagagaagagaggaacgaagccatgagagttgtgtttattgcggagatgacgagtttatagatgcgcttatcgataagaccccaagatccaaaggcccagctggcttcatcttcccaattcgtcccccaacacaccatgcattcctccctgaaccgcatccaggccgtattcggcttcttcactacagtcgcgctggtagtcagcgcactggcagccgtctcggtcctcttcttcccagcagacgagaccaatgcctccgtgcagctgaagaacgtgcaggtgtaagtgaagtcgcgatttgcagccctaagacttcgcaaaagccccccatttactaagatccgatttcgcggtataacagcgtcaaaggccgaccgcactactactccactaaacgcgaagaatacgcccagttccgcttcgacctcgacgcagacctcagcccgctcttcaactggaacacgaaacagctcttcgtctacgtgtacgctacctactcctcctccgagaaccccgactcgcaggtgcgcctctcggagtctatcatctgggacactatcatccccgcgaccccgtcgccgtattcatgggagatcctcaaggataaggtcatcgcgcttctccccgcggctgttttgtcggattctgtcgccgctgcacagaggaacgctaagcgccatgctaagccgcctaagaaggcgaagaataagaaggcgaccggtgtcctgaggctgcgtggccagaagggtaaataccaggtcagtgatattaccggtcggctggcggagcgtcagaatgttacccttcatgttgggtggaatgttcagccgtgggttggtgctttgttctgggcgcctggtacgggtgctgtgcccaggactgccggtacgattgtcagcagtgagccttttgctttccctgaggagaagactgctgctgagaagagagctaaggaggcagccgaggaggcggagaaggtgaaggtggagaaggcgaaggcagaacaggccagtgtataggctttgattgggtctgttgatatagggagttaggatctacctttttttgtttacttttgggagctttggctcgccttatacggttgcattttgggaatgatacatatgaaacgcatcatcattggatagtgcaaacacagctttgtcatttcattttttgttttaggtgtccggttacaccatgaagaacaatggtcgacgctatggatacagcagaggtaagactcgattaggtttaacgtcatagagaatgccgaccgtggacagactaagacaagcatctcgaacaagatagtccggagttcgtccaaagcaaatcaaatggtaccgtaattaacgcctgcgggtggtgcatgatgatgacctccgttctggattcgatcggagtagacgccgggtgcgggttgttgagaggcacgagtcaacggatcccgattgcgacgatcataataaacgtattccaaatagaaggcatggatgtgtccggggaagtaactgggagatatcgctggttagttgtggaatgtaacgggaagtctggatgtatagcactcacccgagaagtgtgagcaggaggttgatccagaagtcaactccgcagcctgaaatcataaaaacaccaagagggggaactgtttggttcgttagcagatcattctggtggataggttggtagatcgaggggcggtggatcactgtgtggggatgggttttgtggtagcttttgatgtaatttccaacagcagaggtgtttacttactgaatatggtgatgatgatcaaacaaagcatggagcaagtgccggccatgattgcggtgatgtttgatgtaggtgttactgttcaggtttggtagatcgaggcttgaaatcggtagtggccaaaaaactaagaaggagaattgcaaagaggaggatgaagatataaataggggtgttgtcctcggcgggagagttgttgcgtttcatcttgatcttggccacgacgtcacaaggtctgagggaactcgtacatagggctgaggcagccgtgaagctgatttgctggctgagtacatcatgacgtcatctatagctggcacctggacaccgccacatgccacgagtcaatacgtggctggtggctgtacagagacggcaagtacaattgacgggcacgtacattgaacggacttggagaagatgtagaggtactgggaatatatttcctgtgatatccccagtatcaggtcctaaaccgcgtcaatcgccgcccgagttgtaacctgctcgttcttgttgccgagcttcgagaactgcaagaatgcgtccactccatacccttccagactgtgcagttctaaactgcctgcccaatattcagcatagactcggctcatagggagacccatccctagacggagattgggcggtcgggatgtcaatgtgtccagggatccctcatggtatgattctcggtcggtgtgtttacggtcgtgtgacacttgcagttcttgcatcgtcgccgccattgcgggcacctgtccgagattttccagccgtgtttgcgtgcgaggacctttgctaaaagaccacagatacggcagaatctctcgagggattcctcctccttgatcagatatgcgcatgatcacatgctgcggggtctcgcacacgagcacttcgatagggggtgggggttcggttgaatcctgataccgctccatcactgcctgcaccgagtttcggagaagttctccgatgatatattccaagtggctcaatatatatgggaaggtcgcgtcggcatggcccttcacgacgatcgcggggatctgggtcgaccccgatatcttcttcatcagatcttgtgcgacctttccacaatcctcgattacctccttcgccttgcactttaggaacacttcgccgacaaattctgcattgatgtcggttcggtcgtgggaatcggggaaatgccatggtgagttgaaagtttcggtcagagctaggtgctgctctgcgatgactcggcgagagattcgctaccgataagatacttgtcagctaggaggcaggccaaaggtcgaccttacataccgctcgcagaagtgtgttcattaaccggtccatttcgtccgctggggcgagatttcggcattccagcacgcctatcgccaggttgggaattgcaaccagatgttctcgtagcatttccttcaggatgtcacagaaacggtcattatcgtcaagcgtcttaatctcaggaaccacccgagccctctcgaatgctttgtagtacagttcgtatacaagggtgagatgggggttggcaactaccacatatggcagctgctggatgtctcgcagacgatgcgcaaggctgtcgatgaccctgatcagccttttattttctaattctgcaattgactctcaacttaccgagtaggaagctcggtccgcacgtagtttgcggagctgataagtcgtggttcggtcaaagtacgaccaaaaaaggtcaactgacgaagactgataggtcgaatagctcgctccacccatctgccagtatatcctaattagtatccccggttcaagcatcggaaatgtgagtcatccatactcatctactgcagaaactggccgccatggcggcgggctgtgagctccagaatagaggcgtttcaagggggattggaggagctgccagcgtctagctggataagacaatctcattgtgctccatggacttattcaataagtgacagaccatagaagtgctcactatcttgtgcgtgcgcgtagttgggacttcaagagtttggggttgccgggcggtgagccaagcatgtgacaccgacacaaggcttgttatggcaagatctgttttttgctgtctagatcgggatatatctcgatatatatggaacgttctaagactgcaaatgccaatgtcatacgatctggattctcgtccgaagatgcctcgggtataaggcactcgcacggactggggctaagctcgtgggccctttccaaggttggatcatctgagggccacggcatatttagtgattgagagcataattaaagaagtatatagagcttgcagaacttaaacgtatttaggtcgctatctatatcaccgctaaatcggcccggtataaaaatagggcttttcttcaccgtatacttcgcatctagtcactcctgcatacattattgcacactgccaactaagcaaactccttttagttccaattcaaagtgagcgacaagttagagctcagtaaaaaaagctgtcaactgcagaaatcaagcacatcaaagactgttttcacagacatcatccaccaatatcactgccgagccctcgaggctccgccaccgctagctccggcccttattattttgcgggttcagacgaatttcctccaccaccagctctacagtgtatttcttgccaacattccgtcttcttattcacaaaaatttcctcaaaatacaacctctgacgccttccgggacgggaaggcgctttccgcgatggaaaacgtaagagattccccgaccgtgcccctcgctagtgtcgtcattggatctaaccctgctctaacagctcgcggagaacgacatgcttgtcgatgagtacgatcaataccctgccgaaaagaccgatgtcgtcgtcgtatcccgctcggggtccgacgagcctgagtccgcgccgaccgcagatgaccgtatgttctttgttgcttctccttccttaccacaagcaagagggctgtttgacgggttagctaggcaaagcatggcacccgaatgagatcgccctcacgctgtgcactgcctctttgcttatttgtgctaagcggtcgctaaccaagagccccggtggatatagatgcggcgatgatggcaaaggtcctcccccacaacacggacctcgaaaccctagacgaggtctataacacatggcgcttgtcagactggcgcaagatggagcgcaagtcgcacggacccgtcttccgatgtggtggttcaccttggtgagtgcttgaaaactctttgcctggattggctccatggctctgtgccggcattgaatctgacacggaaataggcgcatcctcttcttcccctacggcaatcagaccgaattcgcctcgttttacctcgaacatgcgtgggagaacggacccccggagaactggtacgcttgtgtgcagtttgcgctggtgttgtcgaacgtgaacgatccttccatttatacacaccatagtaagatattcaattccggaggaatcgcttgatcaaaacgctaagtcgaattctagttgcaacacaccgtttcaccgccgaggaaggggactggggtttcactcgattctccgacctcaagggcctgttcagccatccgtgggagggaaaatccgtcccgttggtgcaggatgacgaggcaattgtcacggcctacgttcgtgtagtgaaagatcccacgggggtcttgtggcatagtttccaaaagtgtgttttttccgcgaggtttgacccgagtgaagctaactttctctttttagttatgactcgaagaaggagactggaatggtgggattgaggaatcagggagccacatgctacctgaactcactgttgcagtcgctctattttacaaatgctttccgcaaggtatgaaagggaaaagttcgattgctcccgaattatggagactaatgaaactcgttaggctgtgtatcaaataccgactgatcaggaagcttcgcgtgaaaacagcgcgtgggcgctccagagactattttacaacctccagaccaatgatgttgctgtttccacaaccgagctaaccgcatctttcggatggcaatcgagtcagatctttgagcagcaagatgtacaggagctctcgcgaaaactcatggaaagattggagcacaagatgaaaggtacgattgccgaaaaagttctgccggatctgtttgtcgggaaaacaaaaacgtacatttcttgcatcaatgtcgattacgagtcttctcgtgtggaagacttctgggatattcaactcaacgttcgaggcaacaagaccttggatgacagcttcagggattacattcaggtcgagaccctggagggggagaacaagtacgaagctgggcagccatacggtctgcaagacgctaagaagggcgttattttcgagagcttccctcccgttctgcatcttcatctcaaacgttttgagtacgacctcaacctcgacatgatggccaaggtcaatgattatcacacattccctatggagttcgatgcagctccttatctttctgagagcgccgacaagtcggaatcctgggtttaccaattgcacggtgtcctcgtccacagcggtaacctcgatgccgggcattactatgccttcctcaaacccaccaaggatggacactggtaccgctttgatgatgaccgagtcaaccgagctactgacaaagaagtcctggatgagaactacggagactcccagcagcgcacgaacggagcgactggaggacggtccgctatccgcacaaacaacgcctacatgttggtctacatccggaagacaagacaggatcaagtattattaccggtcacaaaagatgatgtgccctcccacatcggtatgttaagagattttccttcttaggagaattggacggctggctaactatggaatagagaagcgtatgtcagaggaccgggcggagatgttgcgtcgcaagaaagaaagagaagaagcccacctttacatgaatgtcggcgtccttgacggggattcattccgaaaccatcatggcttcgatctgactagcaatgacctacccgcggaagatccggcgcttcccacgcaatacaagattcttcggacaaagaaagtcagcgaatttgcacaggaaatcgccgaagaacgaaaactcaaaccggaagccattcgattctgggtcatggtcaaccgtcagaacaaaacaacccgacccgatcaggtgatccgcgatcaggaaatgactgttgaggaggcgtacaacaaattcggcactaaaggtcagatcttccgcttgtggatggaggtggcgccgatcggcgcagacggacaacctactccatggcccgataatgactcgattctcattttcctcaaaaactttgacattacgacccagaccttgactggtgtttgctctgtctacgtccacaagagccagaaggtgagcgaactggccccgacaatcctttccaagatggattggcctgccggtacagagttcatgctctttgaagagatcaaacataccatgatcgaccttatgaaaccaaagcagactttccagcaatctgaaatccaggacggcgatatcattaccttccagcgctcaatcaaggaatctaatctgccaccctcggtactttacacagacgctcggcaattctacgattaccttttgaaccgcatggaagtacaattcgccccggtcaagaccaatgagggggaaactttctacttgactctcagccgcaaaatgacctatgaccagttcgccaagaaggttggtgagcatctcaaggtggacgagactcatcttcgatttgcacccgttatggctagtactggcaaggccaaacctttcctgaaacgaaacgtcaatcagaacctctcacagatccttaacggtcaatatggtgcctacgggtacaccatgcaccgggcagatgctttgtactacgagatactggacatgagtttgacggactacgagagtaagaagtgcttcaaagtgacatggctccccgatggcgtcaccaaagaggttagtgttaagcattccatatccatgccgcagggctttggctaatattcatctaggagattgttgagatcttggtttcccgtagcggtaccgtcgcagatcttctggctgcgttgcagcagaagttggaactgggcgatgagccgatccggattgccgaaacacacagtggaaaagtctacaaagaacttcggagcgaccaaagcgtggctgccattaacgagtacgccacactgtacgccgaaaagatcccatcggaagaattgaatatgaacgccgacgagcgcgtcattagcgtgttcagcttcgatcgcgaacccagccggactcacggaatccccttcaaatttgttctgaagcctggagaacttttcgcagagacaaagaaacgcctttccgcccgcacacagatcaagggcaagaacttcgagaagatcaagttcgccgtggtcccccgtgcatccttttctaacgccaagtatcttgaagatggtgagtgccttggctttgattccattggtcggactgactaactcctcacaggtgacatcttgtcagatatagcggctagcgccgatgacttcctaggtcttgatcatcccaacaagagccggagcttctggggcaagagtgatggattctccattcgttaaacaagtgttaaagtcatggcgctggggggggggttacgagtcgagggctatatgctgcaatccggtacatgagcagcgacaccctgatgcgatgatcatgcctttctcttttttttttgcgtatttttttcatgtaaccagtcgaagtagaagacaataccgtctgcatgatgagtgcaaattgtttatttcccatgtgtgttgtgtatccctacaaaatagactcgtgaagtagtcagaagtcgacatatgcggaagtttgtttgggtgcaaacaagtcaaacagccgaagacaaagttggcccgaacggactcctgacgcggatatcatcccccagttcaacggtccctctcggtatatctgtctcacaatgcggttcgctcttttcgccggtctggcctccctggtctcatccgtcaccgcaactgccctgacctacaggctcgaggcgaacgagaaagcatgcttcttcacaaacgttgagcagagcaacgccaaggtggccttctacttcgcggtacgtccaattggttattcatcaaacacattcattcagtgatattttgttatggtcgcggagctttggatacatttggtggtgccgaatgctaataatgtacgatgcaggtccaatctggcggttccttcgatgtcgactactccgtcaccgcaccgggcggcaaggtcgttttagacggtgccaaggagcgacagggcgactttgtcttcactgcgcagagcatcggcgagtacaccttctgcttcaacaatgagatgtccacctttgccgagaagatggttgacttcgagattgcggtacgttccatatccatcgacttgacgaaccggtcaacaaatgctaattgagccattgaacctacaggtcgagaacgaacagcgcgctcaattgccctcccgccagggtgctagccccgagcaaaccaccagtctggaggagtccatctacaagctgtccgcgcaactctctaccgtctcccgcaaccagaagtacttccgcactcgcgagaatcgtaacttcagcaccgtgcggagtaccgagcgtcgtattttcaacttcagtgtgattgagtctttgatgatggtttccatggctgcgttgcaggtctttgttgtgcgcttcttcttccagggcgcccggaaaggtatgttcatatgttccccgtatttgagatcggatataggcgcaagtcatagtcgtgtttggactgttgccgccgctgtctgtcctacttggatgattcgtaataacgattatttaaaacaggttacgtgtgatatgagcatgagcatgaacaataatatgatgcattttactacctctatgtccggcgtgttggcctagttatttctgttgcaaaatctatgttcttgtctgtctagatcaaaatatactagtatggtacgaagtagttggcttcgagtcatggtggtccgttgatcgtatgtcacaccaaaggaaagccattgaggtgaatatttggtttacaaaagaaatatgagaaacacgaattcaaggctgatggtctacggtgtttcattaggtgggggatagtaatcgatatagtttatactaagttactaaaataggggatttacaaatcactaagagaagatgggttgacacgccggtatgatgaaaagacactgtgatagcgtatgcccggcacgctcgagatgcccgatattatacgttgtaggccccaagtctccaaatcactcttccagagatatgaacggtgtccgtcgaagacattgtgcaaagaggaggtcgggtggtctgcgaacgacatcaataagcaccgacccatagcgcagttgggaaggcgggggtgatcgttgcttcatgttcgtatatgttggtatatgctcgcagggatagaaactgtttatgttagatggtcttttgttgactcgaggccgatgaaaaagtgtgtcgatgttgtgctggacccgttctccattgttgcacctctcccgatgaatgcagccggggaatcagatactcaatgctcgctgctagcagggacagcacctgtttctaggcgaaggataattctgttagaatgtggaattccagtatgtggaatggcttacaacaaaacaacatgcgaccaggatccagaccgcagagcaaaggcgtttggaagctcacatactaatgagtttctaaccggtttcatacgtcagtcatgcattggatgtcctccccatatgtatatgatgccaagtccaatgcattgataaaccttggaatactatgtagcgtgctgagtgttgtctacaaggtacggggcaatgttgtacaaagtaccgtcgagatcgatatctgatccaaaacaggtttttgactttcaatatacgaggggcatgcaacaaagaggatcgataataaatgtgtggatatagggttgtcgatgactgtcttgcccaggggcatcagggtaaggagctatgtacatatgacgtgaggcacttccggtagaatcgactaataagaatcgactagtgatatcatatgcttgctacggtgtacaagatacgttgtacgctaagcttccatcctctttgacctacatacaatacatcatagatcgccgtcaagaggctgtggtgtgatatcatttgagatacgctggggattgtcaaaccccggtatctgactcaagtaccgtttacattgatcggcggacagcaacaatgtatgttgtatgtattgttttccgaatcgggaaagtctgatctgagcctcgtcatatgtaatggtcttttgggttcatatctggtttaggtcttcagaccaggcacgagatggatcaggataatgaagaaagtggatcgtgaaaaggcattgattggcattcaataagcagaggaagacccgcaagtgcacaatgcataatcgcgcacgcttgtttttgacacgctccgctgttgatacaatccacatacattatccgatgctgtcatatctatgatcagccccttgaggtggaggagcggtgttatggatcaaactctattagactatattgtgaaacctacattgtactccacaagtgcctttcgacttgcgacatcgcatagaattggagtcaatccttatacacattatgtagtatcatagtttctccaccaattgtaacaatatctctctggatctgcatattgtagcatgataagctcagtatattacttgcattggtctagaccggtgctagctggattagactgcttcctcagaacaggtctagtttgaaaagtcagatagccgatcatgactgtaacggacaacataggttgtgtttcaaacgctcgtctgacgttgctgtatgtctcgtacatgaaacatatctcggggaaaaggagatctgatatgctgggtataggcctccgcttgccctaatatgtcagatatgtcagtctaggtttgtagtagtaggtagtgtgtcaccatcaagttgggcaaaatgtacaacatgatgctgaggcaaattatcgtgtatccggtgtcaagccgatcttgcaataatttgcctccccccctcccggctggcatcaacttccgtccagggttcatggatggcaaatccgtaccctcctccaccgttcttcggttacagatgatcctaccactggctcccacgtgtcgtaccgatcattcatgccaatatcatgtccttctagaacaatttcagactccaacaaggtggaacgaccctggtttccatatcggaacgcagtcggtcgcgagtttcggctccgactctattgataataggatcttttggttccagtaccgtgcttgagattcatctgccggaagtcagacttatttgcgattagacacaatatcgagtagagctgtggtcaatatacaaacataatatcatttgaagatgagggctccctgacgtcaggtgctattctgcctcaggcatcaacgctaaaattctcaaatcactagctcctctccacacgcccccatttctccctgttattttgtccatttctgatgataccgcggcgaataagacagtctgagaattaattaaaccttcatctgctgcaagctatgtctccactgtggctgaaagcctccatgcctttgatacgatgtaccagaccgttccggattcaagctcagttccgcttttgataatcgaaaaccagcctcgggtagtaactcctttcgtttgccaaatctacgaccggcgaatctccgccggccgaaatacaaacctaaatcgattgctcgggtcgccccgatgcctgggggtatgacggcatagctccgttcgacctgagcctcagctacgcaacggcacgcccctttttctcctgcggccacccgggactacttgatctatcggtttattttgagtcaatcgagggatccagggctctcgttactccgtactagaactacaccctgaattgcggcttttcaaccgcgtattgaccactttaccactcctgcgccgggtctccactagcgatgtccacattttccttcacaagaacaccctatcccgtagcgagacagaatgcaagatgggcctcgcccctcaaaagcccatgggaattcaattatgattcgtcctgcggacgtcaggcaaagatctgcaggggaccggactgtaattgtgccgatctaaaaccgccttcgcctctcactggtcatccacattccccagtgacctcatcggagaacggtgaccaatccataggtggaacaactgatgatatcgctcccaaagtgcaccagtctctgtgcacatgtggatattagttagttcagaacatcctctgatgatgatttgaccccacaccgtgctcctggacgtacccaataatcggtcgacgcggtcacttatgtacctcaaaaaaataagggctggggtttatggatgctcggtttatgatgcttgtgatgatgcttcttatgatgtcgcttaggagaaattatcctcccccctttcaccccccccccttttagctaattatgtcactgtactccgcttggtgtaatcggtagagatctcgtgcttaccatggatgaagcagaaattaggcaccctattggcctatcagaggcaaacataggtgcgtttgcatcaacaatccaccgatgtgatttcatatatataaaccttgctcgcagattggatccaattgttcttcgtatatgccctaactcctgaatctgccccatagcactttccccaaatatttcatgcgctggcccggacaacgtaccgtcggactttcaatttaacatcgcattatctttcctattcgcaatctttaggacctttactattcaactcaactgccaaacttggttagatcttgaaatattccacaggtgagtgaccttgaattgactggtaaataccatccggcttccccacggcacccctccacggggatcgtcccatacatcagccttatccccatgccgtcctatattatatagcacacagaccgtcatgatgccactgatcagcactgttagcgctgcctgatactttgtcttaagaacataagctgactcgttcactactagccattcttccaccatgactcactccgctcaaacgcaacaagcaaccgaagacatccactccatgttcccaactgctggcgtggacaacatggccagtgagactcatgttgaatcttaccggtcgcttgatccctctgccgcctcgctagaggactacaaccgctccatgctggaatacacccagcgccaaatgtcttccttcgtcgacacggataactctcgccgtgatagccggagcagcggcaagagtggccgtagcctcgcctctagcggcagcaacatgtcccgacaggccaatggacctctcacgcccatcagcaatgccgccccctccgccgagaacaagatcggtagccgtgacatggccgacgctaagtctgctgaatactagggctgttctctgtcaaggtatgcatttgcccccatcttggtgtctttgatccagaaatgctaacggacgtcttttcagcgtcctattccacagaccgtgatttaggatcataacgatacatggcattggcgagccgttgatggccttattgggccgtcggcggccacgtctaatttccgtcagtgcctacccaaatgcagaattttctgcggagttttatgagattcgtgcgggagagcgtgcctgctttcaagcgatatattgaattgtttatttttttctacattgatttctatttggcctcggcttgtctgggtcaattatgaaagcgccttttctttccccaacccctttttaccaactttttatttctgctcggcattttcaggatatccgttgactctcagcgtcgaagatgtcttgaatccctaccgtgacttttacctactcattcttgtcacctgtgacggctttggagttgctccttgaactgaaaagcagtttacaaacgatatttcatccccatttcgaaaatttctcgaacgctatccattctcctggggtctgggtatgtgatcaatgcttgatattccttctggaaaggaatattggcctgtacattacttgtacttgtacttcatccgagcgattctgtgctttttattctttttgattcgatgtgatgaaccaactttcaactataccctgttacgataccacctagccatgttggccattgatgacctgtacaattatgcacaatcgaaccggagcaatcttgtttttctgctatttgttggtgttttatttcctttctcctttcttcttctccattggctggatatagctcgtactgttgtagccccgcgtagtacaaggggttcgagtggtatgaaagaatactggctttggtaactagttcatttgtgttatttatcaagttatcgaatgggggctgaaccaaggcttatgatctgagacaatttgacgtcaccgcaacaatcccattgtggcttgaacgaaagatgcgtttatcgcgcctgctttgtaatcttcaatctatttttgcgcctttttcgggtttgtccggtatcttttctagttttttgttgcaatacatatgtaagcggcaagccaccggaatagaaggcgaagcaagcagaagaaggagaatatattttgaaggaggttttggacgagattggtgtcgatctgaatcaggcagttcgttaccaaacattgcaaagtggatttcatccacagtttggggaaacaccccaacaaccctcatactccagggaatgcttgacgggttaacatttgcggcttgcaggaagcgtcttgagcgagaagtattgtgggattggtggtacgcttcgaccagagtaaagagctttgtaagttctcgttgacatccacgaaatactacacccagcatcaatgagaatatcataataaatgcacgttgtgctcagaaacacaggaactgggaatccttcttcgctctgtgcatgtgctactgaatatttgttcctcatttccaaatcgaccttaaacacaggctattttgctcagactcgataatcgcggggtctcaagatataacgcattcccaggaaaattcttttttcaaattgaccaggttcagccttatcatagcctcgttcaagtttaattcggaagcaaactgtgctcaggtatgaagcatagagcattatgcacggaaggtggcctttgtgcgcactgaaaagagactagtcctaattaaaactcgtgcgcttcttatctagttgctatacctcccaaccgtgaaaacgtactgagatccgtcttaaatctccaccaagaagttgatgatgccactatctctgccactatatctaatagtgccattttcgatgtccatgcccatgaggatgcattcgagcatgagcgcctccagtttcccttgctatcttgttggtggacgtctgagggctggcagtctgactcgctacgaaagtcttgtccgagtatgatgagggatcagtagcagtaggaggtgctattacctcaccttcgagtatctcggcggcttgttctgtctcgtatatggcagaaagaggaaggtcctgctggagaacagagcgagctacctcacgctttagccactgagcagaaaagatctcggttggcagattttcgtctgacggcggagccctgtaattattgaaggcaggccagaagtagggacgcatgtacattctgttcaacgtttagattagcgtaaatgaactttgagtgaggtttagaacagggtaactaacggatcgtttggcattgcgcggaatccttgatctgagacagtggttgtttgtccccatgtgtaggttgctattaatcaagccgcatatcagtattaattgagagtgatgaatcggggaaatttgcaagtttcaagcttaccccagcatgaactatccctggtctgggaatcaaactgcaggccgattagcgccatttggctttccggtttagaatcgcataccccataatactgtataaagtgttcatcatctaacctcgcataattccggtggtctcctgcagggaaatcaccgaatttgacagtgatcggtggtgctggtttgccttgacgggctcggagggccgagcatgggacatatacggcggcgagccaagccccatagtcgcgacctagtagaatctatcagcatcaaagatgattttgaggaatttgctccggtaaacgataaagattaggagacatgacagacctaccatggagagcattagctgggccgttaatcaagcgcactacttgatatgcgtttctggctgactctaggaatgaggcaagagggaactcatctctggagatgtcactatgtcagtgtatcaagattcccagtttgacagactggctgagttttactgacacttcgcaagtatatctccccttgaaatttccttcttcaatctcctccttccaggcataccactgggctcctcttttctgattccaagtgtccttgaaggttctgcccggtcttctcggcgccttgtgatagacagtcttaccaccgagtcccttatcaatggcccatctttggttatcacagacctgtatttatttaagccgggttttagaatgagagaaaaggttatgaagaacagaaagtgggggacctggtcgggagacttacctcgtcaaagcccttgccatagctgcatgtgtaagtaacagaacagtcctcctgggcagttgtgctaaaagttgtcactgaatagtcaccaattgttgtaactgccgtcgccggcgctgcttcaatcgtcgtgatggtctttctaggaatgtctgtaactccggggccaacagctccctgaccgaacttggcagcagcatctgcgacgacaccatccgcaccggaccccttctcatgaacgatcacttcggttggtttgacgcacatgtcattgatttcctggtagtagttaaaactagactcagcaccccacatgttcgtgacatcagagccaatggcccacaccagtctagagcctgctcgaaaagtcagaaactaagaaggaacatctaccagattgaaggagagaaaaacgaaccaaatacagcgcctagcatgtcgataaaaccgagacacgtcgggtcttcggtagatgatgaaacgccgcgtttagcaattgatttctcattggaattcgacttttgagaaagccgggagcctcgcttggtcagaccatcttgcccgacgagattaagagaatcagtgtttgcataagacgatggaacgaagtctgaacagcagtatgactgtgatccgcctaaagagcaatttgggtcagcagtaagagcgaacaatcagctatttaacacttaccattgcatgttagattgtatatagctcccaagtccgagtcatcaacataggagttggctaagatttagagagttagagacccgaaatcaccataatcatcctacggttactctgattatatactcactattgatcgcaatgagatcggacccctcagggcaataacctgtaacacaaggcatgccaacaccacgccagccataccagtcgcatgtgcctgtgtttgtaccaggtgcgcagcatagtgtttggacatcatcaccgctgcaggttgtgtccagtgagattccagtgacttgacccttggcataggtctcgggtatgaagccaacggtgcattcctgaccacagaacgaccagtaacatgaattgcgattattagcaaccgcttgagcacttgcttgaagtgtcctgattttctcggcgtccgtggcagcgactccatttgttaccccaattcccaagaaatcattaccacttgtgtttgacgaactgtcctgatcaagggaccagatcatgatgccaccaaggcagagttcattcgccgctttcaccttcatttgcacggtctcgccatcatcgtacgagacccattgatttgagtcccaagtgatccatttaacagcagcctcattatccatagttggtgtgagaccattgctcgaaatgatgcgttgaatctcggcattggatagcgtacccgcagacttggtacactctccagctgttccaccgtagctaaaaacgcagcccggcgtattgcacgaaggatctttcaatgtaaaagaccttccataccagccaagacctaaattcaacatggaaggatcgatagcgttacgccaaagtagatccaggccaagtcgaacctcagtcaggttggtatgaggcttcacgtatggcccagtgaacttactggtcgagtcccaaacaccgtggatatcgtatgacatgaagttgaaaaagttcaccgatttagccatagcttttagatcaaaccaacgcatataccaatatgaggagggaagtgtcacactaataccatactggcctccaaatgcggatttcatatcactcaagaggagtgagaaattgtcagtgtcagcctcaactccacctcgatcctccgccgcggggtactaggtccggacagtcagccttgatttatctgatagagaacaattcgaggttttctgatagcgacttacctcccagtcaatgtccacgccatcaaagccataggtcctcatgaattgcatcagcgatgtaataaaagctttccgattagttgcggtggatgacatgtcactaaacgctgtttgcgtatttggcgaatttgtatcatcctaaaatccgatgagagattggctaataaatgtgagtcatattgacttacattgaaggcccagccaccgatagaaacccacgtctgtaaagatctagattcggtcatgagtcaaaaatacataagatggtcagtttggtgtgtcgggttcgcactcacggatttttctgtttgagggaagtgaactgcggataaaggtcgggatctccagcatccattggaatgatctcaaaactggtggggtggaagtagacaaaggcttttcgagcggaagttagacatctgtagcgatagaaaccgaagaactaatcgcgctatttaccgaaatttacatgagtcaaggcagtaacatccaggtcggatgggtatcgaatatcacagggtcgctgtgtcgccctagaacgtaatattagtataaatgagagatatctgggactttgagagatataaagggcatatctgcgtaccagctctcgtagtatccaattctccttttggttgcgcttgaccctgagcaagaaggctccttcacagcgccacaacttccgaacccagtctgacatttatcactacagaaatcctgaaggcagtatcagtaagatcgccgacacccttcggtaatagaaagcagacttacatcggtagttccgcagaatccaaactcagagcaacaaacgttcaaggggcaggaaaccgagcctccctctgaatactcgccgcattcagctttggcatcgcagttactgaggcaaacgtccgatccacactcatcaggagaataaccgcatacgccggtctttgacaagggttagctaggtggccatatactaaaacgaagacagttcagactgactcacattgctgcagcatgcgccattagagcatggtgttcctggtgcacaggtgccggttggtaatccattgtctgctcgcttgtgaaggctggagtcagaagaatttactggcagtagtgccctgaccattggatttgccgttcttccggtaacattctggtaacgaggtgttgactcttcatgcacttcaaacctggccttgtagatactactgccattctgtacttggcttgtagcacccgtcgtcaattgggataccagaagaagcccggctaggaacagggacgacttcaagccctgcatcatgaatgaaaaatctgaattgattttgagtggccttacagtaaatactgcctgggaataaagtataaaagatatacaaatgattgtcggaggagtctgcctccgagctgtggagacagaagatccatccaatttaacgaatacgaacgaaatttcgtccgatcgaatgtaaccaacccctgaaactttctaccaaaaatacaaactacgaagccatagtgtatatgggtggcggactctcggaaggtctgtgtagtacgagggtactatgtcaactagaattcattgccggttgtcgttggtccctaaaaaccctcgtagtccgtattttttgtatgttgtatgttgtagaaaattttcaggggctggttagtgcttgatttgagacatggagttgagctactactgcacgctaggaccatccggaacctcattttctggcggggccgtggccaccgtactatctcagagtttgaactaggaggatacggaacgcccggacgcccgacttcaatctcaaactcatttcgctgattaagtaaatgcattatacataactgtaaccgtcatgtgacctccgtgctgaggtacgaccagctagcttaagaatacatatcattagttatcttcccctaggctttcaggcctacaatctagattgttggtttgccgaacctaaaacaattatagctagagagaggcgaagctaagaccaagcttcacttggcgatagtgggttccatttccaccattctagtactagtggattttgggggccaaagcatagtgctttcggaattttatgaatattttggataaaagcccgactacaaagaccccttatttcgagatatgagatcaacaagaagaagagtgcattccaccgtacgactaagagaaagcatgctatcaaagttcggtttgattaccctcgggcttagtactactgtccatgctgggttcagggtctatgatggctttcctagtcaattgattcaagttgcttatggactcacggatcagtgtctgcaagctttgtgagactttctctatctataaatacacaatggtatttcagcggctgaacaaagaccagaaacacgacaattctttgcgacaaagctacagctagtaacgcaggtggaggaccggatagtgtgtgtgagtgttgtcttctgtcttgagtttgtgtttattttttttcagaaaattttctctgattttctttatgcttgaagattggacagaaaccaatttgaccaccctatgtacgactgaatgcagcaattcgctctcatcgtggtactccacggttgaggctaattgtgaaggtcagacggtctacagtaaaggcacgtatatgctcgcacaaacagtacctgcaatgtggaagagcgggcaaaatatggtatgcttgcaggacaggtaagtctgctcgcttggggcaacttcaacagctataactgacatggtactcggaacagcgcatctgactggtgctttttggagtcacagaaatggatcggtagtgactatgtccggtgagcttactataagccacctagaactacacgaataactcacaattagctaactagatggtcaccactcgcctgctacaatgaggatcaatcggctatcccagtacagtgctctgaccccacttggtctgttactgaaatcactgatgggatgaaagatgtcactcgtctttataacagcagcctggtactatcagattttctaggaaagaatcggcccttactgacaatgagaagctttgtagtgaatgctttatcaaaatttggcgccagcgtctgatgtcacccctactaccggacggtgcacatactcagtatctcctggaccagtatcagaatattcaacggaattgctcaacaaccttgccagtcactacctatggtacaactcttttggttacagctactaccactgtgactgcatccacacccgcggggacggtcaccgcaacagcgacttcgactacatgtatgggtcaactagtgcagccgtttgacacttatcgaccctgtttcaacatatctgacacttacaatgtcagcaccggggctgtcgtccgtgcgactaataacgagttctgtgaatatgattctcctatatgtctgcctcccccctgtgagattgatactgtgtggtataatcctacttggttagtatgattcttacccccaaaagaaaaagacacttgacgtgcatttgctgacgaaggagtcagtgaggaacttgcgcaaaaatactcaacggccagcaataatatcaccttgactcagttccttacttggaatgccaacattttaggatcctgtggattcttgaatgacgcgcagagaatttgcaaaaggtctggatgaaagcagataccacctttcttgcttggttatgctgactgatagatatggtttagtccgccaggaggacacttctctcccactggagttgtgtacgccccaactgcggctggctcctactattcaaccggtaagtctcgcatgctatataagccttcacaccatatatttttttataaatatctgatcgggatctctcttccacagcgaccgctgcagaaccaacacaatcgggaactaccgcgagttgtgggttgttctataatgttgtttcaggggatacagtgagtttgcggcgaccgcttcattatcatcatcctgctaattgttatagtgtaactctgtcgcacttcgtttgtatgcaaatggcactctcttggtttgatatagagattaatcctaatattagtggcataacattcgacgagcttcaaaacttgaatacctttgtgagtttttgtgatgaagtttctcttcggttttatctactaactaattcacttagttatggaataactgcaccaatctttggctggataattccatttgtgtcgcccccgtgacgacagcatctacatcgacaaacggagcctgtggtcctgcaaatggaaacacggtttgtgagggaacagacaggtatctcaactcattcatggtttgttcttatcgataactaacatttacggctttaatccattagttgctgttcgatcaatggctattgcggagccacatctgattactgcagtgcaggtaactgtatttccggggcctgtgagaccaccgtcgcaaccacgaacggtacctgtggtccttcttgggggggtactacttgcacaaatccaagctttgggtcgtaagtcgcccgctatcctaatttcaaaatgcacctcccagactaacatatctatagctgctgctcaatctatggctattgtggaagtgggtcggattactgcggtccaggaaaatgctactctggtaagtgcgatggtgcagacggtggattgagtatcaatggagaatgtggccctagctttataggtaacaagacctgtgttggcacgcaatttggcgattgctgctctactgctggttattgtggaagcacagaggattactgtggtaccggaaattgctatgccggtgcctgtctttgaaccttgttagtattcatagatcaataaagattgatctaagaatgtaacagccttcagtaggggtcctgaaccagttttattgccatagtaattaatacttagagcaaaatctcgatttatgtgcacttgaaatactctagatcttccatgctcttaagcatttcagaataggcccccgcttttcctacgatttgcatacttgcttgcttattgctgtttgtaactgtttgctagattgctaagcgagaaggttcgatgtttgcaatgtttgcaaatggtcagctatatcaacaggctgcttcccactttccaacttgcttctttcttcatcctcgttattttgtattgaatgtactcttctatcattgcaagaaatcgcatgccaagctgagagtatctaccacgggtgcagtgaaattccaattccacacttggtgaaacataccaatcaacaagctccacgttggaccctgcaataaaactctacttcctgatacagcttagcgttatagacaccctcggcccttgggcatatttatccagcaaagtcttcgctagtttgcaaaatccctcatttcggtgtccggggtattctatcctactgctagctgcactaatgccggagtcccaatttgacccggcactttctgccgagtttcacaacaaaattttggaacatgcatggacaggggccggaaatgacttggttacattgccttccactacttggtggcaaagttccgctcccgtcgaaattgattcccgtctggttccgaatctgtcctcgttcctacgcctggcgaaggtagttaattctaccccgccgggaccaggctccggtctctacttcttttattttttgcgcggtttacaggaacaaacgcgtttttttgattcctcaaccctcaaaacatggggtgatcgttttgtttggttatatccggctaccggggcggtcgatattgaggaagttggtatcatgtttgtgattgacttatcctattaatattttactatttcattctaactataagttagcttcgatcagagtacagaacttgcagctttttttcccgactgggaaagtctaatttgcgattgcgagaaatcatggcaatggagacctctacaggatatccttgcagtataccttcagatgatcgaagatagaaaggtatatacgtcttcaataccttcgaaattcttcccatggaatcttcaaaatttcaccaagtgtgatatcgaaaaagcagtggccgcttttattcgacttatcgacgctattgagcaaaaacttcctacatcgtcatcgccccagacccagatagatcttttatatcctaccacagtcctcgataaggcttatataaaagaggatacttttctccgatcatttcttctcgctcttccgcgtcgatatctttcgttccgatatatcgctcctgggattcaactccaatcgctgtcagatattacagatcagccttttcctaagcttttctctgatttaagtgataggatcgactataacgagaaggatacaattcctctacttctattcaggggtgagggagagagtatatccccttgggttggaccctggttccctgacggggaaccaaggtctatccctgctggcctttatatagaagatattcataaggatatagcgcaagactatggcaatcagtgtaagctacttttaccttttggtatcggtgcgaatggctatgcacgaagtagtaacggcctactacttggttattcttcgaatcctcctctacttaccgatgaagccgatcagctatatcaaattatctactactctgggcttctccctggatggagtcatggccagttcttggataagatattgacgagctgggcagagcgtgttgagttgggtgattgggtagtcacggaggatggcgtttctggagggatggaaaagtttaaggaggctgatacgtctcttcattgggagaagtactatactgcgatgtgttggtgatggcatgttgaaatgcaggttggctttccaaccgttttgggctcactttctgcactctgtgacgatctaccgacttgtgcctgccgacttgcgtacctgccgccacaacctggaacctcggccctcgcacctgccaagttcgcaccttatggtcgttctttcccgaatcggaagcgaggtgttttgcatggtttgcaacgagggaccgcacaaaaccgagtcgaagggatctgtagattgttttcctttctctttcttccttgtacttagaatcttgaatgaattgcactcctttcgaactggcatgtaacacactcaacttattgttgtatacggtccaatattattggaaccctcacaacataagcgagtttcccctttatgtatttaaggcctgcgaccattaacttgtagaccttgagacttttatacattccaattgcataccatacacttggcaagttggatcattcccttcttataatactctggttacatgcagtatccccctttgactaatgcgaccccccccccccccccccccccctcgcccccccccccccccccnnnnnnnnnnnnnnnnnnnnnnnnnnnnnnnnnnnnnnnnnnnnnnnnnnnnnnnnnnnnnnnnnnnnnnnnnnnnnnnnnnnnnnnnnnnnnnnnnnnnnnnnnnnnnnnnnnnnnnnnnnnnnnnnnnnnnnnnnnnnnnnnnnnnnnnnnnnnnnnnnnnnnnnnnnnnnnnnnnnnnnnnnnnnnnnnnnnnnnnnnnnnnnnnnnnnnnnnnnnnnnnnnnnnnnnnnnnnnnnnnnnnnnnnnnnnnnnnnnnnnnnnnnnnnnnnnnnnnnnnnnnnnnnnnnnnnnnnnnnnnnnnnnnnnnnnnnnnnnnnnnnnnnnnnnnnnnnnnnnnnnnnnnnnnnnnnnnnnnnnnnnnnnnnnnnnnnnnnnnnnnnnnnnnnnnnnnnnnnnnnnnnnnnnnnnnnnnncaaagccccccccccccccccccggctgcctgattttcatctcacctcaccgccctccatacaatttgtataggggattggtaatataaccccccttgaaataacccttcctgcctgaattatcgggcattatctatcaccgccttcctaatcaggtaccacatttcctacgctacctgctcaggtctaccactccgccttcttaggaaacccaggtacctgcactttgtatgtaagcccctaacaaaattaagtcgctctagatcaaagagattaattgttatgtgccaattcaaatcagaagaaagagtgcattttgaataagattctaaacgtagagaaagaaaggaaaagagaataaaatgcatgttattttactatatactactccataaagtttaaccatatggtagtctattttttctgccggttggattattctgccaaagttagccgatgacatttcaccgcattatttcttatgattttggagcccataggataaaaccccctggtcagatatgcactcacgaggttatgatttaattgcttcgcttcgctccgcaatcaagggattaaaacatgtaggtgtgagataaaatacgcgtttttttcgatcaaaatgtagggtttttaaaagtgtagaattaagtttagcagaattgaattgatgaacgcacccccttgcatacctccgaaggagaatctgatacactcacaagaagctgtcctcccaacgagttgtgccattgaatgtggaatgggttagttaaagatgctatcaatcattgccatgactatgttgttgtatgttccaattgactctgtgatatcgcagccaaaatagatatatttcccataatcaacagagtaccaggacccaagcccacataccacagcacgaactctcagaaagaccaataggaggaattgccgagcgttcacattccacatggttcagctcggcagcgaatcaaggccataccgtgcctttctgaacagagggatgaaacccctagaatctcggatagattgtgagccaaccaaaaccgcccaagggaggaaggcagaagaaactgcaatgatcctgtggagcagaaaagcgagaattgcatacactgaagttcaacatcgtgttcctgtttattcccctccgacacgcccatccgccaacatctgcgacaaccaaccggtccagctccagctccagccattcattttggtcttaattttggagacctgcacacactcctttaatccactgtctctaaaatcgactttcatttcggatattcaagtctcataaccctacgcgacgtggccagtcgttctacaatactattcatctactctatatttttcataccatcgcgacacaacatatacgaagagcaaaaaatcagcaacaatgcacctcacaactctcctcacgggccttgtatcccttctgtccatcgccactgccatcccaatggcaagcgagacaccaacttctacaacctccgtgggaaagtccctcatctcgccctcgagctctgcctcggcttcacccaccccctcgcccaacccttacgaggcttacacatgtcctccgggtaagttcaagtcttgctgcatgtctgtgcagcagacgggcaaggacattgtcaagtcgcttggcgagttagtgccagttctcggtggggtgcaagttagctcggctatagctttccagtgtatgttcctctctgtctctttaaatagccccgaaagcttgatcaatttatactaatccaatgtgccttcgcaggcaagaacatgactgaaatagaggctcctgatacctgcaccgggaaaggttataaccccatgtgctgcaatacccagaatgatgtatgtatctcatcctccgtttaattttcttgttctataagagaatttatctgactatccttttcttttagggtacctccttcaacacctgcaagcctttcgaggatgtgaagagggcttattattcgaaccagatgaaggatgttccagagtcacaggctgatatgatcatggacattctcacttaatgtcaaccatctggctagcccggaactctgtggcatggactgagcgccggataaactcttggggttgcatactgctaatcgaggagagagaaaaattgtgtctgtttgtttctttttacttctactcgatattatatggtcactttccttttgatagtttggttcatggagattacagtgtgtactgtacgctgttattttctacgttctattcatccccgcaggctctgtatacataactttagattgcttcatctaataagagcccgaatctcaccagattggattccatagctgtttatatatattatcctatctctacgcaaaatcagacatagccgagatatcaagttttctcctggaggtttcttcgtctgacacatctgacatatatggtcggttctcattgccatggtatatcgtcctgatatgtagttgtgtcaattaaaatatgtatacatgtactctgtggtactctgtggtagctactctgcttggtacctggaggaatagtaaaggtcacgtgcgataaagcttcgataagctcctaacatgaaattggagatctgcccacctggttctctcaacagatctatcgtgagatcgctgaccacgatggcgactcatggtgctgttatcctcaaggctgcatttgcagcttgtctcttacgcccggatcctacttcggttcctcgagatgagataaccgcgttccacatctcccttgagcgcgcgttgtcgcattgctccccagccaatattcaggtctgagccgttgtcaccgttgttaactgccaagtcccagcttactaaatacctacagacctgtaaagcctggttgcttcgatttgtcgcattttcatctaatagggtcgggggtctagtcaattacctggaagctcttgctgcgtctttctcaccatcccagcccactggatccaaactttcacccaagcgccaacgcctccacctactgtatttgatcaatgatctgttacatcattgcaagttccacctggacagcccttcaaccttctccacagtgagcgggtccctgcagctacatctcgtgaaattggtcggctacgcagcgagctgtgatcgccaaaagaacccacggcaccatcgacggctagatgagctgctagatatctggtctgagcaggaatattttcatgccgagttagtcgacaagcttcgggaagttgtggttatggggttgccgataagttccaacgatgcggccaacgaactaaacccagccaagaagcccggcaagaatgtgccctttgtcatgccatctacacacggagatccatcgacgcgctggcacgaagttcgtgcaggcaacatttatgcccacattattcccgactcgactatacccattcgacctgatgacacgaaaccgatacagttactagcaggtcctgccgatgcaaattcggtgggagccctcaaagcttttctcggtgatgtgaaccagctcttcgatccggaaacctctggggatgatagacatgcagacatcgaccagctgggccagacagtgatccggggtgagaacacaggcgacattctcgacggcgaacactaccacggatggtccctggaattctgtcaacccgcagatacagacaccgagcactcgcgcggccggagtcgcagccatagtggatcacgaactaataacaagcgccggcgctacagcgacagctctatcagccagtccgagtcacaatctccgagtggatcacgaccatacaaacatggtttccgtcgccacgaggcacgatcaagaagccgttctccacagcgctcacgaagccgcgaaagctcatacacacctcgggagccgtccacttcacacttcccgccacctcaccatcctcaacatcccccacccaccaactcctttccccctacccatatccctggacagtatgcccatcccatgggtcccaacaccggttatccccaagtacctgcacccaactacggttcttggcctccgcctcctccgcatatgccgaccatgcccttccccccacctggacccgggccctcttcgtcagccttccctcctccgtactatcctccaccttctatgccgcagggacagaaccaaggacagaaccagggacagcagcaggggtacgggatatctccgggtcagtatcacttccctcctccttattctgggggtcagcagggtggacccccggctcggcgccnnnnnnnnnnnnnnnnnnnnnnnnnnnnnnnnnnnnnnnnnnnnnnnnnnnnnnnnnnnnnnnnnnnnnnnnnnnnnnnnnnnnnnnnnnnnnnnnnnnnnnnnnnnnnnnnnnnnnnnnnnnnnnnnnnnnnnnnnnnnnnnnnnnnnnnnnnnnnnnnnnnnnnnnnnnnnnnnnnnnnnnnnnnnntggggaggagctcctccccagggcggccgtggctggcaataaacatgtgcacccctgaacatgctcgaaatgcaatcgattccaatgaactgagtcggtggaaaggcgacagccttccatgctgtggttgtcacaattacggccacaccgcagtgggtgtacttattataaactagataattgttgctgcatttcgagtatataagaccatattttactgttgaatattagctaggcttaacagttgtctatcagtttaccagatttccgatcttcagagtagagtctcggaagtgaattcccgtctatagccattttcccgcagttaacgcgtgaagtctattacggcgacctgcatgccacactaaaaaagattccccacacattttgcgacttgaaaccccgcgatggcgtatggcaatccgatatgagatggccattctattcggaggtgccgatcagccgttgcctaaagcatctgatcacggatgaggaatcccatcgaggatcaggccatagtcctgccccgcagtgtccggatcatttgcgcggttgtatggcctgactgctatgctaatcttcagcgttactttagttatataaagtctcttctatctttaaccctattttcttttcttcatatcctgtctacaccctgtctactctcaaaccaaaccaaatcaaaccaaactaaaccaaccaccatgtcttccatactcgccgcccaaattgtccgcccctccatccgccacttctcagcccaccgccctcgtcccgattcgcgcgctgcccgcgctgtcgccatgggttgcattatctccggcgtggtacttccatttgtcccccctgctttggaaagttcacgtcaacggagcttgggcatgtctacgagcgccaagtaagtcttgaatttctgccacgtacttttgcgagttggtgtggagaaactaacctgacatccaggaaccccccactttgcttccacgcgcgctagtcgccgcactcctgactcgcaactttgacaaggactgtcggtgcaggcgctgatacaggacactgcctccgagattgcgaatgtgatgcattatgccccaggagtttggaattggcgttttgaatttgctttttgactagcacaagggatggtgctattattatacattattactattgaagagagagggagtggagatggcttgatttctctctatcgctgcgactagcaaggatcattgcatagctaactttgcgcgaatggatccattactgaattgactcgagctcgagtacgtagtacgagaaacgaaccaaatgtagcccaaagtagatcgagtccgaggaaccccctcacctccttattatctatccactttgttccacactcctctattttcagttggcgacggagtgatccgtgtcaaaatagtatacaaggcggccagccgatcagctaaaccggttcccactcggaggccgatacggctgttccgtttcgtatttccccttctccatgacgcggtcgatcgccgtcatgggttcatgccgggtaggcgctggatcgtgagaagcttcagtacttggagaggcggcatcgtcggcatcatcggagttcttgaatcgtcccttactcgctcgcttcgagctagtgtcgttggccgggggcggtgtcgacgcttgtgctttgcgcttatgctcgttctccatttgcttcatttgggccttgcgcttgatttcggcttcaaatcgggattgtcggtcggcgttgatcgattgcttggcgaaatagtaggctccgccgccggctacgggggatggttagttttttacatgggaatctctgggattgtcactggtccttggccagagatggatcgatatcacataccaaggcaaagggtgccccagcccatcctgtttaggtgagatcatcagtaattacgttccggtttgtttggattttcttctttcagatagtgaaatcttcgctcaccaggtagatcgaacctagagatgacatattagtaagggtaaagaggcattgggtagaggtactcaccgtattcatggtgaatgctttggtggtgatatgtgaagcagcagaaaaaggatctctacgtcaggcccgaggtcgggcggctacccgtggacgcccggacgagctcaccgcccggcctgatgactgtaatcggtgcctcaggccaagggttatcaaccatcgcatcgtctttggagaacgcgattaaagacgacctttgtcttgatcttcttctccatcgtatatatactgtcactctagttgatatcccactgtctttcacccactcctttcaccaaccctatcctgttattttacaataaaccggagaacctcacttcgccgcctgttcatccggcgcagtatcgttccatgctggcgtgaaataccttttaactggggcgtcgctccgcctcactggtgactcactccctgagctactattgatcagaattctcacgctgtttgtttcctgaacaaagtccaaacatgcctcccaaacgcaaagcagccgacagtaagtcctggtacacatctccgaagtattgatggctgattatatccagctggtcggtctagcggtgcttcaaagcgggctacgccggtccccgatatttccagcgacgatgactactcggaccaggaagagttgccagatgaaaccaacttgaaaggtacagtgtggcagtctgctcacctgaagtgaaccagagactaaaatttgaccataaagcggtcgtcaacaagttctctctcgaggcgttcagcaagaagaatcatgcggagaagacggacccccgatttggatacaaggatctttcttcgctcccgctgaagcgcgaccactacaaccggccgttatggatcgagcctttgaaaggcacaatcacactcgagagtttctccccgctggcaccccaggcgcaagatttcctgaccaccattgcggaaccgctttcccgtccgacccatctccacgaatatcggttgaccggacacagtttgtatgccgcggtctcggtcggtctcaaaccgcaggatattgttgagttcttggaccgcctgtcgaaaacaccgctgcccgaaagcattcggacgttcatcatcgagtttacaaagtcctacggaaagatcaagatggtgttgaggcataatcgatactatgtggaaacgacagatcctgaaatgcttcagcggttgctgaaagatgaagtgatcggtccccagagaatggataataccgaaggaattatcgaacgggctgctccgaaaatgggtggtcttgtcattcctggaacgaaagatgcagctggtgtacgagagaccactcaacaggaggctgccgctgccgtagctagagatgggaccgaagaaggaggggccgtgaactatggcattgacgacattggtgaagatgatacagaagaagcaaccacatacagtttcgaaatccccgctgctggtgtcgaagtggtcaaggcccgctgccaatcgatcggatgtcctgccctggaagagtacgatttccaaggagacacagtcaaccctaatctggatatggatttgaaacccgcggcgcggattcggtcttaccaggagaagagtttaagtaaaatgttcggtaacggacgagccaagagtggtatcattgtgcttccttgtggtgccggtaaaacccttgtgggtatcactgcggcggcgaccatcaagaaaggcactatcgtcctctgcaccagttccatgtctgtggttcagtggcgaaacgagttcttgcggtggacaaccatcgaccctggtgatattgccattttcacgtcggaccataaagaaaaattcaagcgatcaactggtattattgtgtccacatactcaatggtgtcacagactcgtgcccggtcctatgatgcccagaagatgatggactggcttcaatcgagagaatggggtatgatgattcttgatgaggtgcacgtcgtgccggcatcgatgttccgaaaggtcacatctgcaattgccgcacagagtaagcttggtctcactgcaacactactacgtgaggatgacaagatcaaggatttgaatttcttgatcggaccgaagctctacgaagcaaactggatggaactggctgcacagggccacatcgccaaggtccaatgtgccgaggtgtggtgcccgatgacaactgagttctattctgagtatctgcgggaaagctcaaggaaacaggctctactatacatcatgaaccctcgcaagttccaagcgtgtcagttcctgatcgatttccacgagaagcgcggcgataagatcatcgtattctctgacaatgtctacgctctcgagcgatatgcactcaagctgaacaaggcttatatctatggcggaactcctcaaaatgagcgcatgcgtattctagagaacttccaacacaatgagcaggtcaacaccatcttcttgtcgaagattggtgatacctccctcgatctacccgaggccacttgtctgatccaaatttcgtctcattacggttcgcgtcgtcaggaggcacagcgcctgggacgaattctgcgagccaagcgccgaaacgacgagggcttcaatgcgttcttctactcgctcgtgtccaaggacactaatgagatggtctattcggccaaacgccaggcattcctaatcgatcagggttatgctttcaaggtcatcacccatctccaaggcatagacagctatgaaggactctcgtactcgacgccagcggaacgccgcgagctcctgcaagaagtcatgctgcagaacgagtcatccgccgacgtcgaacaggtcaatgatgatctgttctcgatgcgctccggcaagcgagtgacatctaagaaaggcggtgctaaacgcagcgctgccactcttagtggtctggctggtggtgatgatatggcctatatcgagtataacaagagcaggaacaagcagctcaaggataagggacatcacccgctgttcaagaagatggaacgagaccgacaacgccgcaagaaggagagggagaacgaagaataaaagctgaaatgcgctgctgtttttgctttcctttttcaggcgcgtagtttttgacctttcttcttgtatgcacccagaatgacagataccccaaataatcaccatcagtatatggtaaaaaatgaacggcaagttaaaaagatcatttgtgtcgtagaacaccctcgtccagaaactcttgtaatcctgaaataaatatgtcagcacgaccggtctagaaatcatcgccaggcctagggctgctgaccgtttcccatgacgttggtcgtcgcaacggaaaacccgaaatcgggcaatttctccgatttttgtgtttggagttaataattgtacgaccctgataggctccattggtgacttggatttcttatggcactgtctagatcaccctgacagttggacagctccaatcatcactagtatacacggaccggatggtttgagctatataaatgacatgcttccccgcgttcttcagtgtcacagacgtcatttctccaaatcaagacttataactacaaacaagtcttggcttctcttgcggaatagtattcgctgctattccagtttgcgtctaccatttcaaacagcctgctcgacttcgacgtcttcacctactctaccccttccgcgactcggcgcgcagtacagctcgtatagtcccaacaccgggaactttccccgcgttactccatccagaatggccactgctactaagatacatctgtcgccggcgacagactccggaatctacagcttcaatgtgagggaagacaccgcgcggacagtgagcgagctcttgcaggaagatctggaaatccaccatgtcttctttaataacgaacggttccatagtatgtacttcccaggcgaagccctcaccaagaatcctatctaatgcaaagacagatcacataccccacgagctccttactatctatgctcttggtgcatcaccggaggaggtcaagacttgctatgaccggaataagcgttatcagagacccgcccttccggcaaaccaagatattgtccagtctatgcatgatgtcgctaaattcaaggagtgctctgggaaggaagaaaattaccctcattacctagctttcttccagcaggagattgacgcaaaaggcgtcccagatgttctgaatgagtatttattcgctgaagatgagcgagcggagagtatgatgtgtcgtgtgtttgccggtaagtatatcttacagttgtactgggctatattatattgtatgttcctcgggctaattcattcaggcctcattcacccgttcatccaactcggtttcgggattgaattcaaccaacctgctattgtagcccaaggtcttgctcagatagcagtgcacgatgactggctgggtcgtgcctatttcctacccgcggagaagatggctggcggcatcggaaagccgggacagaagtcgctgttccagctcataaatgagattcgggcagacaagacccttgttgagagtgttcagtggtctgacagtaataagataaaagatggagtgctccacagagcgcctgagcagatgttgaagtatgcttctcaatttactgtatccaaggatcaggtgcatgggcggttagcggatatgaccaatacagtcggtaagtctagtcttggaagcgcttgcttgtgttatttgaatgatgcgagcgagaagctattgctgaattcatctcgtcagtctactataccagtgccgcccagcgtccgaccaaagagatgtggcttgatttcttcttgatccattgtgtcaattcctctatcttcttttctaagattatcgaactccctttcatgactcagcgatccaaactgcgcatgctggaatggaagggacgaatcgagctgctgatgtatacttcgcgtggaacgccggatctcctcctggatgaggtggccaattattccccgaaggacaactggtcacagctattcgcgcgtagcatcgcccatcccgatgacgatggacatctagccaagctggtgcgggctttggcgcacggccagaaagtctgccaggtatatgagagaacacatcccgagatgcggatcaagggaaatatgtggcttagcgttgggaatataggtgagtatcaaaatctccattacatatctgtcaccttacctaactgctcgacagccgttgactctactgtcgaggagggaggtagaccaatgtgggtccgttctactggattcgatgaagcatgggagtctcaacgggcgcatatctgagacgggcaacacgccttcttcatgaggatatttatttcattgtactttccactatcccccagaatgttaccatttaacgctaaattgatataaaacttccccatactttagaggttgaactatggttcccggctctagctgcagtggggctctaaccttggaatgacgccagcggctcaacgtgattgtgcttgtatagggtgcatatgtagtatgttcgaacggttttcaagctgaattgaaccggaatgggagaagaacggagagtatcatttcttgcaaaggccagacacaggaatagggagaatcgtgtgtagaaaacgaaagaacgaaggcaaaaacattggggatcacgtggtgtcaagtggggctccccaacatgtattcgattctgcatctcctcactttcccccccatcagtctaccgaggtagaatctattgttattctccgatcttaacataatcatgggcaacgaagacagcaaggacgcatcaacccagaagaactggactgatgatgagaccaacccgttcgttgccttccggcgctacgctgatgagcaggtctccaccatgctgcaatctatcacgggcctcccttcgatggtgacacagcctcaccacggccactgggatatatttgaggataatcacgactataagagtcggatggctcgtcaacgaaacagtgataatacgggcagcaacaattatccaacagaacgagacagcggaagtggttatccggatggagatgatctacgcaactatggaaagaatgcacgaccacgccaaccagagaacgatgatctgtggaagaaatggtctaatggaccatccgagctgtttggcctcgattctttcttcgaccggttcttcgaggaccgcttcttccctttcgcatcgcaactcctacactccggccagagccttctcctccgggatatgtttgaggacaccgaatctccaacctggccgattgggtatatcctgttcagcccatactcgcctctccatctagaacgtcaagcacagtaccaagcaaaccgtgagaagggcgttttctcttctatcatgtcgtctttgcatctcaactccgaccgtgacccctccgaaccacagtggcgagaagccttcgaggatttaatccgactcgagaacgacaaatcgatgctcgatcgtaatgccgtcaccgcaccagagtctggaaaggattggctacaagggcttattaaacgaggcagcttgggagataagtggaagtatgttcctggcagagatggccagccttggtcgggcattacgttctctagccgtgcaggcccagaacaggaccagtctcggtctcggtctctaccggagaaagagaaagaagccgtcgatacgaaggaggctgacagcgagctggagctgtatgagcgcttcttgcacgatattgaaaatcgcgaacgcgagttcttccgcggggtttccgaaagccctcttctgcgtctcctactcgaggaccgacggcgacaacaggaggaacttgagaaatacagacgcagcgctccaaaggtcgaagatgagcacagcagtgacgataatgagaattggatcgatcttgtgtctggcggaaacaagaaatcagttcctgaaacacccgaggatttgccgaccgagatccagaccaagccaacaccaaccgaagctgtctcggaaccagcgcagcctcgtatcatctctactataactcgaacggaacgtgtccagcttgctgatggctcggttcagagcaagatcgttaataccaggcgttttgcagatggccgagaggaaagtgacgagtctgttgaggtgtctcatccccagaaaggttccaagtctgactctgacacaccgaagaacggttggttctggaaagactaggactctgtttggacaatatctacgattttaaaatgaccttctctcatgtcttaactcttcagcgttcgttctctcaatctattcttttttatctctttcaatttgcttcccaacctgcttctcggctatgcatggaaaagtcaatcccatctagtttgatatctcttaggaaataatgcaagcatggcggctaccgtcggtcataattcaatttctctatgagactaatatcaagcaaatctaagccaagtacactaagcatcttcagaattttaaaacccactcgatctacgtctaatcagccttgacactcttcttccctcccttgccagtagtccaccccctagattcccagagtttgacgttatcttccatcttcttgtaagcccaagtaaacggcgggtctacacaaccaaagttagcacctgccacaaagccaataatgagaaaacatacaaaggaactgtctcaaatcatgacgattatcctcgggggagtactgctcagcgtggtagctaggcgtgagaacagtcatcttatgtctgttgatggagtagtagtagaagaagtggcgggtcttctcgtagatctcgcgcgggctgtactcgttgccccacatgcgaagcagcttttcgtacatagagtacgggcctagcttggagaccttcctcaagtacccgaaaacgcccagctgcacgtacgtaacgcccatgtcggcttcgtcggattgcacgtagtcgtgcgagatgggttccagctcggctgtgggtgttgcgtggatgaattcttcgaggatcgggaggtcgaagctttgaccggaccaggcgatgaatttcttaaggtcgactttgcttatggagccgatgggattgagctgttgttttggttagtctggtataaagtggggttgaacttgcgggaattgatgcttacgtcggcggagctggcatcgtacttggtgagatagcctcgcaaactatatgggtttagtcagtcaccagaaaggaaattagtgtatttatgtggcgtaccattctgtaatagcagttagtgaagatgctcaacaaggtgcaatattcgggtgagagacttaccatcaacgttagaggatgcaagaacgagcaagccaccacctccagggcgttgacgcacagtcggcaataaagaggcaaacagatatgagagaaccattctcatccgagcctgcacattctgaagcgcggcattctctgcgaaagatccaccgtgcattttgaaacgaggctggaagttagtgataacagtaaagagattcatgatagaagtgaccacagtatcgaaattgaagtcaatgtggtaagacccaatatcggaggccagccgagatgctctgtctcgtgtctccttgcctgagttttgggtgcccatgtagctggtatggaagatagacctagagaaattggttaatgttgccccagactagataattttggcctaaagaatgatcacttggaaaacttacttgcaaatttcttggctggtggtaggaagccaatctgagtcttctggcttcgcacacaaccggcggacatctttgatgacctgctggttcccttggcgcactgctttgagcacttcgcgagtcatggagtgcacaatgattgccgtggcacagctgtcaataccaccgctcagagggaggaagaaaccggcggctccagatctccgaaggtaatcccatagccagcaggcaggccccagagcaatctcctcctcggcaggatggtaccgcggatggataggcagagcaggcgcgaggttaggttcggcatcttcatcccggtgagacagcctgatatcaagatcaaggcggacaaagggcgattgcttgctggcttgcattccacggcttgcgctgcaccggtaggtgcggacttcttcgatgtcgaccgttgcagtgacaacttccacatcgttcagagagaactgtgaaccttgggccacgatgtcaccgttgacgacaatcatagcacatccgtcatagtacagacgatcgccatcgcagccttgttgattggcgtaaagatagattccaccactctgtgagctgtaagaaaagtgctatgctattggagcgttgtttttcactcaccagtttggtagcctgggtgatcagattgacccgagtgttaagcttcttcagttcgtggtggctgcccgaagaattcgagatgatctcaacacctattttgaattagacaatgagcgcggccatggatattgatacttaccagctaggccatacgggatgtgagggctaaaatcgattgttagcatccacatccacttagagagttcaacacctacccattaggggtaaacagctcctcacacgtctcaagacccagacacgtatctcttgtgctgataacagcatcaccaaatggaaccttgtactggcctgtgatatctccaactattgattccaaatagtagtcatccacctcctgtggacgttgccatggcgtaaagtggcggtgctcgcgatagttgccatctagattagggattgatattagaaactattctccgaagtataaagagcaattgaacgaaccgttcgcaagccacatcttcggcctaatcaggataatcttccggttgtggaaaatgacacttgagaaaatatatcaactaatgctatatcagtaatatcgggaatacttaccgacagttgtagcgcacattgcgatggcgaaccggcaatcccacatcaaccacaatatcctggcaatcgggatggtcgatgatgcgggcgaacatttcccatgcgtgcatgaaggtgtcgccctcaaggaaaccgtccagaactccatatccggtaatctcgagctccggtccaacacgcaaggtagcaccggcagccttggcttgcctgatgctctcaatgatacgctccgcgttgccctcgaagtcgagagcccactggttaagagagctagaacgggttagcgcgggacttcctagtatcaaaatagtgaatgtgtcagccttaccatgttgctagagtgactaggtgccccatgattcctaatatgactgagacgtctgtgtcttgtgctttgcacagaggctcaccggcgataagagccgaaagaatgaggtcacgtgtgtggggagctcagattcccccgcttctgtggtaattacatgactgtacattattgtaatctattcttctctcagcactgtcggcttaactccgaccaaaaaaacatgtaatcagtttgtaagcatcccgaggtcggctgctgattaatgcgatttctccgcctgtctgtgctggattccacgttttgatattttagatatagactcgttattgagtgagaattttcttcttgttcatatacttaccattttagacattccttgctggcgatttggctcttacagaatgagcacgactgccctgatccccgccccggctcatacgctcgcggattcaatgttgtcccgacactttggcaaagagacggttaattacttctccagtaaggatgtcttagactcttgtatatgaggcacagtagggctaaagtatctctaggttctccaatcaatcgtctatctttcttgcgctccgaccacccgttcctgtccagtgctctaaagcacccttcgacccgatttgtactgttgaacaacctagcgcccttgactccgtcaccgtcgcagctatactatgccaagtatgacgatgtacgcaagcttgttccccaggatatcttcgataaatccgaggaagacatgatcaagaactatgactcgcgcaagacacacccgacccttatattcctcggactggacgagagtcacaaggaagggggtctgacgtacaagatctactctggcacgccgtattttgcagtcgacgtgacccccaagggacctgaagagcagcagactgcagcgaaggatataatcgctgccatggaggcgaagggactgtcattcttccaaacacgagttgtcatgtccttctccgcagatgaaggtatgaagatgcgatcttaatgtctgcatctataagaggaaactaatcaactcgggatagctgctatctatgcacaagcacgtgcgctgatggactggaacactcgcaacaccttctgtggtacatgcggccaccgtactttggccgtgaatgcaggaaccaagcgtgcctgtccaccgacggatgttgcactaggaattgagggcaagttggaagagcggccggagtgcaatacccgcactacgctgtcaaacctttccttcccccgtaccgatccgactatcattgttgcggtggtctccgctgatggcaagcgggtcctcctcgggcgctccaagcgcttcccgccagggtggtattccaccttggctggattcatcgagccagcggagtcaatcgaggatgccgtgcggagagaggtgtgggaagaatccggcgtcactttgtcccgcgttgttatccactcctcgcagccttggccgtatccggccaatttgatgattggtgctattgcccaggtcagtgaccccgctcacgagaccatctctttactgcatgaccctgagttggaggatgcgcggtggtttgaaattgaggaggtgcaagaggcgctgcgcattggtacaagtgacttgagtggtccggctggtccagaatacaagggcggtttgcgattgccccctcctacggctattgccaatcagttgattcaggctgctgtcagcgcagagtattttgcggcagataagcagtctaagatgtaaactcatacttcttatgaccaccatatataacattgatgaatttagaccttgaccatgtctgaacaccggtagtatctatgtaaaagccctgttttgaattgaaaggctcacacggaatatatcctaattctaagtaaatatttgcttcgatgattccacaccttccaagctttcgaaattactatcatattgtatttgggaaaagacttcatgcatccatcatgagccgaaggaaaacaaatatgtttcatcaaacttccctttgacgatatcaacagcctattgatgagcattagaaaaacagttcactatgtgtggactgtcagcgggcttactatggcatctttgaattccatgacaattgcttcttcctcattgatgaggtcatcttctcgcacggtaatatggtctttatcgtatgtctccgctcgatcaaaatctagccaaacgactctctgcgtctgaactatccttgacgatcatcatgttccgtggttttgaatctcgatgtctcactagtactttatgtatttggcgaataccctttaggagattgttcacccgttgcggcgtgtaatttcgcaagttgatcatccccagactggtgatgtactcgaggaatatagcgctaggcgggtattcgtcgtcgagaaacttccttaagtgaggctggcataggctagggtcaaacttcctcataaaacctaggaagtctggcacaattccacgatcacaaagtccttgctctttcagccgagtgtaggtagtggcttcaagtacgtgaatatccaatccacgaccttcctgttcgtaatagcgccgcggtcccctcccatggtgctacttatattagcaagaatatctagatgcatagtaccttgttgctcgacttaccaccttcatgatgcaagtttattgccggatctcaacgaaaaatatgactgaacatcatcaagctccggcatggtctcaggtagaaatctgtttttttttgaaggtagttggagttgtttgcagagagcattacagggaattgtaggtgacttggccccagtattatgcacgccccagcgtttgatgcgctaactcagaagcaccaatcactccacactcttatccatctggcaagtggttgctaagtatcaaaatcaaagatatctactattcacttgatttgctgtagctcttgcagattgatgtttaccctatctgaaacaaaaaactccttctaggaaagattgtatattgtatattctaccttcttacggttctcggatgggcgctctagcgattcgcagaggaaatgatatgatcatttcttgatgttgaggaagggatgcgcgattaattgacgagcggttttcctctcctctgggagccaggtaagcattccacggacaaaagacagaaaagaatctcgctcattctcttctagagatgggagtgtagcttctagacttcgggcaggaatcaagtcatcgtagaggaattttcctaggcatattagcgaaaaggaagacaaatttcacttgtatgattaactacaaaccttcgtcactgaagaaaggtccatcaaagtattctcgtgcattgctgcaggaaataccggcttcattactgataggatgaggccaattgtgctgtgccatggcattttccttcgcaattaatttctccggaggaggaccgagaagcgcgatcatttccgctagatgtgacttggagtcgtatcgaccatccgtattatggacttgctgaaatagctctgtgcattcaataatattccacatctgatttgagggataagccttgttcgtgatactcagacagagaaagaatcgggggagacgttaccatgacaccaaaattccaaatatctgccttagaatcccaaccacagccaagaattacctccggtgcacggtagtggtcaggctgtatgggatatatgccagtttggtcccctccggcctcttttctcggagaatcatagcttagacgtgtcgataatccaaagtcagctattttgggtaccatattcttaaggtttgtccaatcaagagccccaaaatcattgtggcagcgataaacggtacgaccggtcattatgtcgactttgtattgcataggtacttcgttgatctgtagtttaacaaatgcggaaagaacactttcattttcaaaactcataagaatattatctagtttcaaatctaagatgatttcattaaattagttctttatatcataaaaaatggaaaggaaatggtactcaccagtatgaacgactccacaatcagaatgaagaaagtcgaggccaaccaggaggaaaaatatgtaagcttttacgatcggtagagggagtctccgatcaacgaaacgtcgttgtagaatccagagaggctcgcgcattggtttataggctaagcataggtggtttccttctgtactagccacctcgaaactctccagacaggttcgcacgatggcgcggccgcgatgagattgattctgccgtgtaatgtgctcctcaatgtctctttcatggtaaggctcgcgatcacggcaggagtttattatttttagggcgactgttcgttctgactgccatcgaagtcttcatcaattagttatgtgataagagggcaaaagtggaacggcaagagatagattagcgtaccttgtgatatctcgagctagccagactgttgatcgagttccccaaccaatcttcaccagtaattgataatgactagcaagaatgtccccggggtttgccgagtaaaagtgattggggctgtatccgggacagatctcctcatccacagcttcatgctgtggaatggggagtgcggacctggaaggcagatgccagatcggctttctcgcgagggagaagattgtgcgcttcgccaattgattcattgtttctagagataaattgagagacgttcacatctcatcaagacgtgctgcgaataggaccttgatatatactgggccaaggatatctgcacctgcctagttagttaacttggtggctggcaagttgtgatgactaatcaggttattttcttggaaggttccactctgagagagttaaggtgtgctccactaaatgtctatattgtggattctctacggagtaggtacgctccgaggatgatcatatttaactacggagtagtatatgtctcttagttacaaatccatttactccagccaatcatgcaacttgttactcgactgtgattttcggagtttttgggatgatcctagttatcaaaggaaggacacggggttgggcagagatttaagggaacgttgggaagagagcacgtgaatcgttgatcccactaccccgtcaacagtgggacattcctaatttgtactacatacagcatagacagtaggtatgtcgctttgaagtttaggcatctgaactggtctggcggggaggagtccttaaagatcatgcatcatgcatcttgcactgctgtgattactcgactccatgtatgcagaaactgccgtaattttgcttcatgggcccgagtttacgagactgcgtgaatttgaatacacaggcgggctctccaaggtgtgatcttcaataaacggcggagtacccccgaagccatttgcatcatgaaaaaatgccacatctttattgatcctttcgcgtgttcccggatgaggtttgtaagcaactttcctgcggctgagatgggccacgacgactggcagtttgttctgttcggcaagatggcccagtgtgggatcccaataattgttggatatatcgaatatgaaaagtgtgcagactcgccatttctgtatcgctaacagccttgtatccggtgtatcgtcttcttgcacatcgtaatctgcgtattttcgctgcttttctagtgaggatataatgaaatagaatgcagaggaagtttgagaaatatatacccaccgctttcgcttctcataccgctttggtagtggtatgagacgtatacatttgacgacgcggtgtaacaaacttccaagagcacatacagttgcctgaaggtttcgaggagcctacctgggtaggtgttccgactctgctgattcttgcaaagtctgaagcaggccccactgttcagccgcatttcagccctcccagttgagcctcatcccgtaccagcaaatgaacctgtagtgtccgacatagcagatcaagaaaacaaactaaataacaaggaaaccatctatatagaagtttatcctttatctagtaggtactagccatggccttttgcgggcttctagtcgcgatcacaacgagaatgtcgctgctgcaatgtcaatggctattcgggatatggcgtcatcttcagacctcgctactacgactggccaggcaagaacgaacagaacacacgtttccatctattggcagtaagtcataattattccggtaccggtaaggctattgggacttgtcacattatcagaaccacttggaaaacccagaaagctatgattccccctttaaagaatgagattttgccacatgatgatcggaacgagaaagccaagagatagagaacgggggtggaagactgcgaatcccttgatcgttcatatgtattcttttgttttactcggtaggtacaggtgaattgtaacagagacaccacacaagaatcaagattttaagacgaccatttcaaatattggcatacaacgtgccatcccgtaattcgtgaacactgctgttccgactgtttggggacccgacctccgtataacgagtgccatcacgcagttcatggatcgtgattcttcgagtgctcttgcgcttgcgctgcgagcctcgcttagaatctggggtccctgactcacttcgcacttgactgcctggtgtcatatcgcgctcctctctgtctctctcaatagctgcctggagcatatggtccgcaaccctagccgagccaatttcatcgtaccatcgacgtaagccagacgcgtacgcacgttcctgcgagtcatattcgacaggaggtccgttcgtctcggcctcgggacccgaaccgtcgaatactgcccacgcgctagtatcggcactgacaagcatcatggtgtgatcgaaactctggaccttgaagtcgcgtaagagtatggcgttgccttctaccaatgttggcatcgaggccttgtggcgccggaaaatttgagcatgaagagtcatgccagccatagatggatcggtaagttcaatagtcacgaaccagtcttttgaactagatttggcccgggttatcggcgaagcttcatgtacgattgagatggtatcgactagagcattgtaatgatcaatgagtgtggcaagtggtgcgaagtaggaaagcttgctccgcagtccagaagcattacggtcgggaactgagggctgtggaatgggaactgccaatgtgttcggagattcaatcacaacatccatagagcggccaggttcgggtgttgctgtgggttctgcggcttcaacggattccgaaggagccacggcatcatcatgtctgtcaacgtggatctcttgtgtgttttttatgagtcccgccccgatgccatcgtcttggtctgactctggggagtcagccagcagcaaagttttatcaagaccagtaggggcttcagtttcttcgatcgtggatgaagcttgatgttcaaaatcatgaatcagttcaagcggggatgcatttttctgggtggggtctgatgttgagggttgtcgcttcaatggagacgtagtggacggcgagactcgaccgccaagtggctcaggtccttcgacagttggctcttcgacagtcggctcatgcttcaacgggaaatcggctatggtatttctagcagacgaaggaatatgcaaatcaaattgtccgtccccagtgagatactgcccagcatgatttttgccttccaaggatggaccttgatgatgagattcaggcccatcaagcaagtttggatcagcattgcctgattgcccctcgttatagtctcgatcgactggcactcctatctgtgcgtgagggttggccacagtataatattcgtcgttgtcagcttcttcgatgagctccgcatgtttaatttgtttatcttcatcttgctcaaggttgggtgatgccacttcagatgcacggtccgtttcatagtggtcttgggacgactcatcatcatccatatcactttcgtaaactcggtcatattgttgattgtattcgtcttccccctcttcctcatcttccctgtcttccctgtcttccctcgcttccctgtcttcgctttctccaccgtattcactcctttcaatgtcttcgctctcttcactgtcttcgctttggcgttcatcagtatcggaatcgtcttccactactccgtgatagtcttttccgtcaagataccacggctctggatattcctgtacaccacttgcaaattcggctgcagctggagggacagcgggatgttcggattcagagcagtatgagtgatcgtttcgttctgctgactgcgaagctgaggctaccggatgattggaggcagactcatcatcactgtcactgtccagcacgattacttcatggcttcccgcctgcgagggcagcttttgttcctgctcaggcttttcaccactagattcaacgacaccgaagtcatcttcgtccaatcgtgattccaaactaggatcaccatataaatcctcctcgtcctcttcagattcacattgagaatcgtaattttccactgactccgcatagtacacttcttcgtccttttcttcccggtatccttgactgggtggacgatcgacatccttttcgctttctttctcctcttctgtatttttcatcttttggtattcctcatctcgagcggctatcatttttccgagggcatcgatcgcatcctgatcagacgtgagccctagttgtggatagtggactaagtgagtctctggctcaggatgtttctcatcacgagattcacccggatattgaggagatcccaaattgtcgctggcagtttcgatgccaagatcatgttgagcaatatctgatccatcgacctcttctgaggattcgagtgattcatcttgcccagcctcctccgaaggtgaggatgatcctgagttatcgcgccataggtgactggaatcaacgagatgttcttgatatgtttcatctgacgcctgagcttcgtcggtggcattttcggtaacaacatcagcttgagcggcaggtgattcatctttggtattgggggagtcatccaatttatcttccgagtccgaaagtcgtgctggatggtcgtgggataggttaggatcatcaaaagcagaatactgctctagttcatttgacatttgagctttgtcgccagtagtatcaatggccatgtcagcttcgacgacatctgacccatcaatagctatggagtcgattatctcaactccctgcttctccggtaaatcttctgagcctggatatgatgccgaatcattgcggataaacccagcatcgaagacatgttcctgctggacggattcaacatccggatcaactgtttctagatctgcgtgaatggaatcgatggtgtcggtatcatgggtttcgatggaggatgctgcgggcgttgctatggtatccattcccgcctgagcatatccaatctcttggaattgtgtgggcgcggtccatggcaggaaatagctagttgagccagcatgatttgatacgagtggcgaaggaatcgggagccccggagaagggatgggtcgaatctgcggcgtatccgttggcagatggaaaagtgtttcatgatcatcaacttgtccatgagacacaacatttgactcggcggcatgtctttcgaggatactcccggtcaattcaagagaaggcttcgcaaacactggaagtggctcttgtggtgcatcctctgtgtatgttggagcttcgacatcatccgtcatggaagcctcactcgccgagtctgcctcgagttcttgatcgatagattgattcaaagcctgttcccaatccacaggagcttcttgctcgcgagggctttcgggttcattgacaacacgccaatcttccctgtgcaagctgtacctcggcttttttcttcctttccctggcacaaatccatcttcttccgtaaaaggatcgaaagcggaacggattgttcccccaagtggggttcgagtagaattgaggaacataggtgatccccagggccgttcactagaaggcaggtcgaattcgggattgattgatttgccactaggggttgtaggcgatgctggttcggtttcatgcggtgctgtcacttgcggctcaaccgatattatcaacggaggttgggaagatcggtagatctagataggcagcagttagtcaccataagacacatatcgagtttgggagcaacatacctcgagagatacgccattctcaaagtgcgcatcccatgcgacagacctccccggggttttctgggcgtcttcgttgctgacaaacttgatgtctttcaaggccagactaacggtatccccaattccgacatgcgattccgcgaccctttctgcgacgcgtccgtggaacgtgaccttgatttgtcctctggcgcccctcaggcggaagtccggctccgctaatagaaggctcacagtcttgatcgaagaggagtatggccacacaagtgctacagctgcaagaaaagacttctcggccaatttctcaaggtctggggaaagctgagctatcgggaccctggtcaactgcgccagcgcattcgacgcgggagactgctcaatcgcgttcattgcgccggtttgcccacgcccgactgacttttgttttatcaagctggcctcatatcaaacaggagtaatagtcgatataaaataagaagggtaaaaatgcgagtatataaaactgggctgaaaggaaatgaagatgaatatttcgtgcaacaaagaggaccttcggcagctgcagctctgttgggtaatgttacagtaaaaacagcaagaaaagggcgtaatttcggtattgggagaacgaaagttaccctcttcggttggattgtccatgtccaataagacttgctgattggtcgatcttattatatagtcacatacggaggattatgcactgcttttgaacgtgaacatagtgaaaacattcttgtagtgtattcttcatgtcgttatgggtctacgctataagacaccggatataaaaagcagctccactatggcgaaagcgcttggcatcctccaaggtcacttcttttttctcgcaactcaccttcgcatttctgactacataggttaccaggaattcccaagagctcgttgaaagcatgtcaatcacaaatactattcggcgagtggctgtcatcggcgcggggccctccggccttgctgcagtcaagtaagcggggttgttacacatccgccaacatgacaatgctgaccgactcagatacctgctcgccgagaaatatttcgatcaaatcgaagtcttcgagcaaagaagctccgtaggaggagtttggaactacagtccgagctcctctaaagaagggagatcaacagctgtcccacatttaaccccccatgagccagtcgagaagccagtgtggatcgatcacaatggggggcgtgaggcaacattcgtgtctccagtatacgatcgactggaaaccaacatccctaaggagttaatgcgctactcggataaggccttcccattggaatcccagctcttccccaagcatcggacggttaaacaatacctcgaagaatatggcgaagacgtcaaaggcctcattcactttgagacacaagtcttagaagtgaaactcaaggatgaaagtctgagcacttggagtctaacatcaaagagtcttcaaactggcatagacacaacccacacatatgatgctgtggtggttgcaagcggtcatttcacggtcccttacatacctgaaatcctaggaatacaagcctgggatgcatcatacccaggtgctatctctcattccaagttttacaactccccagaacctttccaaggaaagaaagttgtggtggttggaagttctgcttcaggcctggacattggttcccagatcaatgaagtaagccaaggcaagctgttggtctcccaacgatctgaatcatacttggctgcatccgcaaatgacgataaaatcatctgcccggagatagtcgagtttcttccttcgacaacctatgacagaggtataaaatttgcggatggtcgcatcgaggaacatgttgacgctgttgtcttctgcaccggctatttctattcatatccttttctatcctcactcaacccaccggttgtgacccacggatggcgaacaatgaatgtctaccagcagttattctatatagagcaccccactctcgtcttccccgtgctttcgcagcgggtgattccattccctatggctgagaaccacgctgctgtcttctctcgtgtatggtctgcgcggcttacgcttccaccaaaagatgagatgaaggcatgggaagcttccgaaattgaagccaaaggagatggaaaggatttccatttgcttccatttcccatggatgctgactacctcaattttctctacgactgggcggagaaggccaacccacgacctggcctctctaacaacggacaaggcaaacttggtactcggtggggtgagcgggaaagatggatgcgggcccatttcccagaaatcagacgtgctttcgtacaacggggtgacgcacggagcgagatcaaggatctagcggagctcggtttcgactttgaagagtggaagaggcaacaagatgatcagtgatgattatggtacaatttcacatctcaaccagtacctacagcattaacggtgatctaaatcaattagaaatccattagttttgcatcttttgaatcattaaatagatatatgagcctataacccttgatcagcatgtcactattcccaaatattgtagatctaccgataagcgttatcacgtgaagcgggctcactatccgtccgcccgtcgcgccatgcgtttaccctctttcatataccgtcacagtgctttggggaagtggtagatgttgcccagaattaaaaattgtatgtgtctcggatcaatgcagctcatatgagcttatattgagtattgaacctacgctctcatttcaccccgtcatgttatccaacatctccccgacactaatcgcccgcacatgatgcttcgggagcagcttcgctcgccgaaactccaaagtcaccacagaaagaatactgaccggccttcagctacaattgtggttattagcgacagcagtgagagcagcgacggtagtgacttggacgacgaggagtggcctatcaagtgtatcctccgtgaaacagacaccgagtatctcattgattgggagggtccatacgatccgacttgggtgagttcccgtggcaatattggacataaaaggcatcaaagaaatgattgccgagcttgaactaacaaatgcgcgctttgcttgtttaggaacccaaagagaacgcaagtgagcttgctatacgggtctggaacaagcaaaaagctcggcgatcaagtgcgctagatcggaagtcgacaagtaggaggattactcaatcgcccagcgtcgtcgaagtctcttcctcatcatcagaagagaacacaggccaaggggacagctaccgcactaccttcgacgagactgaggacactgattctgataatcattcaagagcttcctcgtcgctatttgtgcaacaagacaacatttcagagatagtagactctcttcaatctcagtacattgaagtctcgggctgcttttacgggaccgcctctctacctcaatctccatctacaaaccctcgcctgcaagccgacgaatacatccctgagtcacctattccacctgaatacccgcaacgaggtgagtgggacgacgtcaatacgcagcagcctggcccggtttgtgaccaaaaggccgatttaattaatagatgctcatcgcatcgacagtactctgcggaaatcaaccacgtttctgaattattatcacacccgaacacgccgggtgttggactgagctccaacgtctccgaaatagccgagacgcctgttcagccatcaagtttaggaaccgatttctcgtgccccggctcctatcctttttataataccccatctcacaacaatttgacttttggctcgtgtggctccatcctgagaggtagtttcacatgcaaaatcaagttttacattttgttcacattttgctcacattctcacagactgcgtgttcgtccggtcaacttatctgagctcaattccggaaacagtctgtcaaaacctgtcacagcacccagaagagctcagtgctgaaggtttcacccgaccaatgccatcattttctaatctcgtacaagaagaaccatttggcgaaatcatggaagacaaagagcccaagccatcagatccttctctctccgctgccactttggaccgatacggacaattgccagggtccactcccacggaaatgatacggaacgcctgggccaaactcagcgaagcgaatcaatcagagctatcgcaaccagctaacgctgtccaaactccgtcttctgtgggggatattgaagcttcgatgcctgtgtctatccccgaaacaactgctctgcttagcgtcagacccgacacagactctttttccaattcccatactgcagtccaccatggtcattctgaacctttactaccaccctcggaactagcgcacgaagctcatatgagccaaccttcacttcaaactattcatcccagtgcgttgaccgtcaccgacatggatgaggtggttgcgcccggttctgtccaccttgggccatctgaatttgctgtccctcttccgatgaatgcacgtgtgaaggatcactacgagcgagtactatcagatgcagctacatgcatacgcaaattttttgatagctttcagtcgaatactcaagtttcggagcctgaggcaagtaggatgtttctgggatatgattcgcattgcttacattgttttcacagcgagaggttttgcattcacatatgcgggaggtcatcgcccggctgagcaatgttgcaacctatccagacttgaatttcgccaatcatttgaaaaataccgaccctgactttgcggaagaggcatcctgggcggaaatgtccagtgcaaagtttttcctacttggtcatttcatgaagattgtaggtacgcacgagctccatctgattctcgctgtacaagacgagaagaaacagggagttctcgagcgttatctccaagggaaaggttttgcatacacccgaccccgtgcagagatgggtagcaccttggaggtttccctagccaaggggtcactgagctttggaattcattcgagtgagaccgcccgtgaactttacaagccgccgtctgctatttttgccctggattcgtatttcaaacccaaaagcccgttcatacagcatctccgaacgacttatgcccgaaacgggagcttgcttcccgtcatttggtttcttgtcgccaacacaagtgaacatatcgagcgttgtttgcccgagtcgccggatcctgatcgattgcgtttacttgtgcactacattgcccgtttccatgacgaggccggtgagctccaggatgatgccctcggcgcgtctgaagatgccgaagagattcttggatatctcttggatagtgttgctggttggccattgcctaccattaaacctttgaaccttgtatcactggaggagttagagtgcgacagctcttcatctgacgaggcgatgccgccggcccataaacgcacactggtaattataccacatgttgatgtatttgaattcagctaacgctttggggcaggatgagaaacccgatgaacactcgtcgaagcgcgcacggattggtacccaagaggacagccagttgaccgagtcaactaagcctcccactcaaacgttggaccgtgatttgatctcattggagaagaatattatccagatgaaacacattcacgcaagtgaaaaagcccagctgcaggctgagcttgctcgggcaaattctggattccgagaaatggagagagctctgggtattctacaacaccgttacgagagtcggacgaaggaactccatgtaactcgccaagagcgtgatcgtgtggttgagcacaagccgtctctagaacagcgcgtcgagaaacaaaaagagactatctctagtctgaaacaagaacgggcagagctgaagcgcgagctcgacgaagctagacaggcactcaaaaatggcggtggcagtaatgctgaactagagatggcacgggaggaaatccgtcgtctgaccaaagaaaattcgaaccttgagcgcaaagctgagtttgagaaaaaccaatccgagtacacccgagagcaataccaaactgcgtctaccgcggccgctcagtctggcaccgaaaaccgccatttggccactgagaatgagagactaaagcgcaaggccgaaagcaatgccgtgcaacttcgtgagttgcacatgaaggatgagtcggttcgccatctagctaggattgaagagctagaactaactctggcttcgcgcgacgaattcctacaaaggaaggaagaagagcttcgtgaaatccggaagaatcgtccgtcaactcgctcgactagcactcaaccacgaagccccaagtgggcgggcagccgtccgaccagccccggggttggtcataatggtaacggtaatggcggtcatgggggcaggggcagtgcgctacgatacagctcagaggtgcctttctgagggtattacacaatatcccataaactttcatgtcccctgccattgatcatgttcttgccactcatttttcctacaccaatctatgacgtctatacacgatacatagacgggggatttgctctttgcgaagcatttcactatcacattagctagatatttattcctttcatccgctcattacgacattgcatcttcctggcgtttcatccattgcgactccacatttacccatgagcgattttcgttttgcgagagaaaaccgggtcttggatgcaacattatctgagtcttgtcatctccaagcaagtcaactgtttcatccgattttcatggtagttcttttcgccatagatctaatgacagacatcttagtgctttagtttttttgagaaaataaagacgattcttccaaatgtaaaacatcaatctggatttcgtattcggtaattaaaatgtaagcaaaaagtagcaaagggccgcaaaattatggattatgtatacactgagataataagacagggaaggaaagaaatactttgtcctggacagcagcatacaaaatggacagataagtagaagagaaaagagcccatgtctaaatctcctggaaatagacatgtcacagtccccgaatgcaatacgtttacgccgaagccatagagttagcaatgaatgtagccagctccttggccttctcgccacgagtcatagtgaaatgattggcatcctccataacggtgattccgccgacatgattcgggccgacgagggtatcccaaccatttggaccgagatcagtgcggttgttcaacaaccagagcatctcacgagggtctgggctaccatctgcagctggtgcagggcgggcatcacctggcttggagcagacaccatccttggcccagaccatgaaggtcttggggagcttatcggccagcttggggtctgtgtgagggaagggaaccgccttgtaagcatccagggaatcgatgaaagccaggaagtgagggagaagccatttaggtggaggtgccttgccctctccaaacagtccgaccgtatcaaagaagctgtacaggcggcgaggcagcttctccagtccaacggggaagggcgaatcaagaagcagcaggcgctcgactcgctcgccttcctcgaagatcagttggcgcgcggcgtcgtacgcacaaataccaccggcggaccagccaccgaagttgtaagggccagtgggctggcgacgccgaatctcagcaatgtaaggagctgtgagctcgtccaatctggccttgagattctcaggggtgcgcatgtatgggcagttcaatccatagacacacacatcgggagaaattccagggatggaagcataggaggtagcagagccagagccatcagggaacaaaaacaaactctgagtcgctgtctttgggtttccttgcaggaggattgaagtggccggcgggtgctggggggtagtgctgggagcgaccaccggggctcgaacagggatttgttcggggaatctgattggctccgcaggggctggcttaggctttagacccaaggtagtctcgatatcatcgagtgtttgattctcaatgaagaactctcccgagagatcaagatcaagatcttcacggattttaccgagaacggtgagcgacatcaatgagtctaggcccatctcagcaaggttcgcatccccatcgagctcctcgggttccacaccgatctcctcagccaagattgaggcaatctgcctcatgctgtcattttgctcctgcgatccatgtgccatcggcttctcatttgcaggacttggcagaccactgctgtttggactcgacaagtcggtcgaagatgcggccgacgacatgtcaccttcactgcttgatccgtcactactttcactagggctcatttgagctagaagatttttgaagtctttgacagttggattatccacgaagatagtggagtcaagatcgagtcccatgtcctcgcggtatcgcccagtgacagtcagcgagagaagggagtcaactccgtaatcagcgaagttgaggtcatcagtcagctcagatgccgaaagtccgacctcttcagcaaggattgcaagagcacgcatagtcagacttggcattccagatcttggtgaaggggcagcctttttggcagagccagtctttgccttctcgatattgacgggagcaggaacacgcttggcggccggcttggatgccgctccagctggaggaagagccatgtcgaggatctttcgtgccagagcttggaactatgtcgcattctgttagtgtttcattcgagaatactacgacggtttttcgacataccttaacaccaccaaacacagcaacgatgtcatctccatcaaacatatagacatcaccagcccaaatagactctttccagggttgcatcctcacgtaggtgcggtaagtgacgctcggatcgaacttcttcaagcacctcatcgagtcccatccatgattgacgaacacttggttcttcgaatcggtgttatcactagcattcataatgaagccagacaagtgaccaatgctgtcaatccagaatggattgcgatgaaagttgcccggaggagcctcaaatttgaccagagcggtagcttcgtgttggtcactgtcgaggatgacttcccgaatggatttgtagttctcgtcataatcaaccagagaagcaaagagcttgtagaccattcctcgcttcatgcggtgagcctggccggatacagtgctctcttggagatgctcaatgcttcgcttgatgaggtaagagctgcgcttccactcgacgtcgtaagtactgggatcaaagaacttgatgtagcaagtggcgtggtcaaggatcttcttcccctcgggggtcacagaccacacctgcaccttggcattttcttcggcccagtttgcagtcgctgaaacgcggaagagctgcttgcctccctttgcaataagcggcttagggaccaccatgttgcagacatcaaatccgcgatctttccattctggcttgtagttctggactagatattcaccaagtgtttgggcgatatcggcgtacagggactaaaaatcaattagcaagcaagactgttaaatgagaaaagaatatgcataccgatggagtaaggcaggcaccgttcaccttgtgacctgcaatgacacgattgaggtcgggatcagcaatgtcattctcgatgacgatagacgccgacgaattgtcaccactcgtctccaaaaccttttgtgctgccgatgacaagaaaacagaaactggcgcagcatcagccactgataccggcggtgcacccttgagcagacagaagttattagtgtaaggaatccagtagttcttgagatcccacttgtaggaagggagtgggagaactttgtgtccagtgaagtcctggtgatattccttccatcgaatgtcaattccagccatatagagagctgaaacactggttgagagaaccttccacgtgtcttcctggcgacggagagatgccacagtagttgcctgaggaccgaaagttgccttgaccattccggagcagaccgggtgagagccaatctcaacccaaatagtcttgtcattcattaagttggagtgccgggtagcttcaagagcacccaggaagttgacagtctcccggcagtgacgggtgaggtagttggtaccaagcaactcaccgttggtctcattgatgacgtctccaagaagggcagatacgaatggaatagagggcgcgttgaaattgacgccctttccaatttcagccagactttcaagtataggttcaacctgagctgaatggaaagcaaaaggtacatttaacttggtagccttgaacccttcgttggtaagagtttgcgcaagctcgtcaatcttctcgcttgcgccactgataacagtctcgctgggcgcattgatacaagccacctcggtagcctcatcaagaaactgcttgacctgtgccactgaagacttgacagcaagcatagcgtgcgttccaacctcgatttgttcagtgagaagctgggctcgtcgcccggcaaggtagattgtgtcgctagttgtcaagacaccggaagcattcagcgcggcaaactcgccgaggctatggccaatgacaaaggtaggtacaatacccagagacatccagtactttgtcaatgccatttgcacacaggttgttccgagctgtgtaacgatcgggctatgctcttcaattggcacactcccgtcgaccagggacagaatagatgggaagccctggctctcacagatacaattcaagtgttcgatgtgagcacggaattgggagcaactatcaaacaattggcgtcccatgcctgtgtactgagcaccttgtccggtgaagataaatccgatgccaggtgcattggcaggagccgggctgatgctgtctcggttgacgataggagccaatgcactcctgacttcatctagagtagatccagtgacagcgactctgaagggatgatgaatccgtctcgctgtagtcgtgtaagacagattggcaaggaggcttgcatcgttggaattgaacgagttcttgtttgtatcgatgtactgcacgagagcagagatgttattcttcagtgcagactgggaccgagccgaaacaagcacaggatgcgcagaccggatatcttccacattctcgtcattgagcggaccatcctcgaccatcaaagcagtattgcctccggcggccgagaaattgttgatgaaagtcttccgcttgccaccatttggcctgttccaggggacagcttcagatgcaatgtgcacattgcgctgcgggaagtctgtcgggaagttgtggttgatcttggtcttgatgccacagtgagggggaatcatgttctttcgcatcatcatcaagaccttgatcagagctgtgacaccagaggcggactctccatggccaacatttgactttgctgaaccgaggtgaagagattgggttggcccacgacggtagtcaggagcgaagacatcgagaaccgactgcatctccactgcatcacctgcctgggtgccggttccgtgcatttcgatataactaatctcttttgggtcgctgttggactcgttgagaagcttgtcgaagatgaaggactgtgctcccacatgaggccgagtaattgacacagcctctgctgagtggttggtataagctcctccaataataccgtagattggatcgttgtctgcctgggcatcctcaagtctcttaatgacaatggagccaactccatctgctctgcaatagccatcagccccatcatcaaaggtggtacagtttccggtccttgagaggaagtgtccacgatcaagaccagcatgattgtcgggatttgccaggatgttgacaccgcccgtcacggcagaatcacattcattcctccacaaggaattgcaggcgacatgaattgccgcaagacttgaggagcaagcggtatccacactaacactggggccgctgaacttgaaatagtagttgatgcgaccgggagtaaaagcacggttaccacccgggataaagtaggtgtcaatatcctgaccactgttggtctcacggtagtcatcactggtcattccatagaagacacccactcggttcttctgcgtagagggcgtgctgtcagggatgaagcctgccatttccaaagcctcataagcagtcaagagtgccagacgttgagcaggatctgcttgaagtgcttcacggggagacatattgaaaaatcgagggtcaaacatgcccgcgtcgtcataccagcatccatattggacttggctggtatttcttttctttccttccatgtcaacgtgagccttgacatcccatcgctctgggggaacctcgcggtggacgtccagtccttttttcaaaagatcccagaaagcttcggtatcaggcgaatctggaaatcttcctgaaagaccaataattgcaattttggactgctcagcacggccggtacgattatctccaccagcatccttccggacatcaccaagtgtgctgtcaacctcgagattggagactccagcctttttcaatgagttaaataggctctgggttgcagtgctggaaattgggaacagagtgcatgttgttgtagactccaagattgactggcaagattggatgaccttgccccagcaaagctgtctttgtagaatctcctgaagagaaaatctcaagagctgctcaaggctctcagcctggagctccttgcctgtctcacttgacagcacagggatctgaggcacgtacatcatgaaattctctgtaggccacgattccaaaattcggttaatgtccctgttatcatatagatgagaggcatgataagggccgtggattggaaccattgtgggcttgtgctcctttgagagactggactcaatgaaacggcccagaaaagtcgggggaccactgatcgtgagtccattggggcttactgcgctgatataaggttgagaaacgcggggcaaggccttgaaaatattaacaatgatcctcttttatttcaagtcggtttgggggaaaagacttacattcttcttcgtgtactgttgaatcaaatcctgggcctcgggctcgtgcataccagaaattagtacagaccagcttgatgttgccgatttgcttggttctatgagctcttgtactttcaaaacgcacatcccgagcctcaaggaaacaaggacggtctcaattccagctgcaataagctccccgatagttttcgaagagcttacggccgcagatgcgagttgaccggtgcaaagtccaatgatgcagctgtcatcacccgacggataggcatggcccaaatcaccatagtagctataagacattgtcagtaagtttgattccaaaatctcatctcgatatcatcaaggcggcaatattcttactggatgaagcatcctagttggtaaattgttgtcaatgcactctctagagctgggttcggccctgactctttgaacctcgcgagaaggtcaacgatactagtaaagcgagggaagccctgacgttcggatggcggaagcgatgtaatttccttgcgtaacgcatagtagcacttttggaagaatgctgctacaagcgagtcattcttagcatgcaacagccgacgaagcccggagtcaaaatccgcagtctgatctccaaagagatacaaatgactggggccctccataatcttcctggtagcagattaatggtttcaaagatatatggaaaaagaagaaaggttcaggtcaggcgaaaacttaaggatatcatactttatagagtattttccattagtgggtcgtcagtggaagattgtaatagactgcctctcaattttcttagtagtatcgaaataggaaacataaggtttaggacccatactttttctgaatcaggatatagcaggatatacggtatggtaactcggctgaacccattgggaaatgtatgatcttagccgcatattctctagtattagcgagaattattattattggtatttctggtattgcgatgtatacatcctcaaagacaccaatggtaccgttactgcagtcgattccataacgccttcaaattgtcggtatgtttgtctgagcagagcctatgtggagatgggctggaccgaactagaatcttgtttccttggataatccgattggatcctgaattatcagtttgaattactaaagcaaccggcaaaccgatgatagtctacggatacccgtgtgctgtttgcggataaaacgagcaatgaccccagagcagagatcaggattttggacgggtatgtgagccgggatgtccgtgacaaatctatcatatgatagtagaatcatagactatagacccgtgctggagaaaaattactatgaagttgcaatcaaggagataatctcgctgcattcggaaggttacagccgctgcttccacgtatcacgtggttttatttgccctagattgatctccctgtttcttagactagaaattttaagtaataaaataatacatcaacgttcaatcgaagatcttagagaggcttgtttgcctaatgttctcaaaacagtaggggatcacataagtatagaagacccttcttcagcatggaatcatcaagatctagaatagtgcatgggatgtctcaaataagtaagaaaatgtagatcatctgcaggcatcatctgtaatgttttttcatacgtcacgactccagcttcaaaacttatcttctgagacattgagtcttgtttcatatggtcgcggcctggaagttttcactctcattcttacggtgccatctaggccatgaataagatattcaaataaaaatgttcaacaccttcgatatcagatactactcaattgacattctagaataaaccatagattacacacgtggctagtcggacgatccccatggcgatccagatgttctcaagcaatcaaatcattgattgacgacggaataagatctgccgataaatgaacgcaaacggactatcttctacaacaaacggagaacgatataaacaaatatagtaaaataaaactgtatggtatcctagctagtattatattacaagataaatgaaaataaaaaaagtatgagcacagttaacccaacgcttgtcatctttagcaggaatggaagaaaagcatagccacgccctcgcgatggagctcgtgctactgaggccgaaccgacctgagaaacatgccctctgcagctagtgtggggcactcgttacctaagcaacgcctctaccaccaagcctatagtttgaggttggagggatctagtcctcacactctgaggccacacatcaataccgtcgagtagagcaacagccattccattggccatgtgagtctggatatggcagtgggagatgaagggtccagggttaacaacctggtaccgcactatcatccatgttggtccgttaggtccattagtaacgaaagtatctctcatttgggggttctctagttggaagagttcagggcattcagcataagcttcttcggtgctgaaccaattgaatatgccaggactaaaactaagaatgaaacccttgttagagtgcttgtgcattacatgcggggcttggatggcaggactgttgggcatttcacccaactagagcaacatatcgacccaggtcccatttttggtttgaatggtaacctgcggctctaggttgttcttcgcgttcatgtcatagagaatcgggtcgtcccagttagccatcatgtcgtacaaaccactacctgaagtagtccatgtgtaagacgagcccaaacggccaatggagaggttcaagttgattggtggctttagggatagtgacagcagggtgattcttgatagccttgttttccagagcaacaacaaaagcggaggtgtttcttccgccgtaatccacgtaaggttgagacgcggttgtgtcctgagaacccttgtatttcattgtagcaaacccagaaaatacctgattggcttgggtatctggaatggtgtattccttctaaggcttgtcaagcttgatcatcgcggcgtagcgctcaccgctgaagatgtgaacactctcagcaaactgaggttcgatgtagctaccattagacgcggcacttacgaacttaagacccacccagccagcattaggatcaacttcaatagtctcgtgcaaaccgatggtggtagtacagccagaatcaaggccagctgaaatcttgtcctcgtatgtccattgttaatgaacttattgattccggagaaaagtatagtatatcaatggaatatgagggaatgagtaatcttgcctatcaatctcgacaataaagcttgcctgcgtggaccagggaagcagtatttgaatggtttgcattgtgattattatgataatcccaagcctcatgcttctggggctggatgatcctttgatagtagccgcaaacatgtttgcatttttgacaaattattgtttgtcgaatttgcatagtttggcaaagataggcagcatgggtgttcactagggaatgtccaggtggctggggaagctttgacctcaaacaatttccccttttaacccagactagaaggccgaggaatgcaaggtcattcctagtcaggatccaagataattcaaggggtgtctagggatccgaagcagtagactgtttgtgcgtggctagagattccgtggccgcggtgagaatgtggcaattcccgatccggcagcctattgtagaatgacatgggctatccaatttcccgattttggagttttaatgcataatataaagacttcaatagctctaattgcttgcttgcaattttcgttctgtctttgatttagttgcctcaagtgagtaagtgtgcggatggattaaagcgtctatgcgtagtcccttggaggactaaagcatagctattcagctcaagacataatactgtgtgggattttgtgtgattccgcggccgaaagaaagcttggaaggaaggaaagaggagcaatctaaaattactagtactgagcttatatatattgccagttgtctgagattctgcacaatcaacaagtcaacaagtcaacaagtcaacaagtcttcaatctttctattctacttggatactaagaaaatgcctccgctgagcatggagtagtaaactagatttcctagtctcagacttatctataactaataataagggttagtcctcgacagttctgttccaggttctcctagagatctaaatctaacaatccccgagtatctcacctttctaaggcagtcctcaggattattcatttgaatacagacccagcaggtgaaaataaagatccgccagggatcctctgttgtcgagtgtaccagggttgttcagtaccgaaccatggatcgggtacggctccggccttttcatagaagtcgcaacatctgggggtatatatcgaggtgctcgagtaatatgacaccgcagggcttgatttagagaaatccacacacataaatatagggagataacctccaggaagaggaatgacctttgaacgatcgggaaacaggagatattacataatctgcattaagcttatcgataagccagccctccgccgctagtctcgatcgggccacaaacaaacaaccccagtcccggtttacgccccaattgtcgtcttaggcctcaccgatttgaatcgctctaccttctcacgtcttagcaaccggttccttggatccatttggtgcagttcaatctttattcgctaatcctttttattttgaatacccaattaaaactccttattccgacaatgctgattgattgagcgatcattgctatccctgcggccgtgcggaccttgtcacctatccgaccaagctgtgttgtatcgggttcgaatcaacagcacaacctcatcgattgatacatcattttcctaccttcacctggacgtggacttgtcacaagtgcgccaggtgttgaaacagcctattaggtcgatcccgtgggttgcgctcgacgaaactgtgttcaagtaatcatcatggctcagctgccaatgcggtttccatgctggtgccgagcagtatattcatggggtggagagactacacgagatctgggatttgtggagggtgacttgatcgaatgcttgaatgcgggcgatggacaatggtggatggggcggttgcgccgtgacaggcgcgcggttggactgttcccgtcaaattttgtcgagctcctgggtgaagactttgtgcccgtaagccgcgatactactagtccaatggtgctagcgggatcttctccgatcaataatcccacatcagctcccaagaaacagaagaccgtttggcggaaacccttccaggcgcataaggaggccgtatcaccagcatctgtcgctcggcgcgcaaccgcaaccagcccagccgcacctgcgattcctcaaacaccacctcgggctggcggcatttcacgaagtaccaggccattgcgcacgcatgcgacagcagtcaggaaccaaggctcgctagctcgacccacatcatccacatcgcggccctcgtcacataacgtctcccctcgttcgtccgcagagcctgaacggtcaccatcaatgctgccgaggggaagcgtctcatccgctcgaccttcatcccgcgaccaacctccattacaatcgcaggaacgtccatatgcaaacacctcaaatggcagcctctcatctacccgtcgcaacccatcccctttgccaatacgcgaatattcgtctggaatcatcacacaaggcagtactcccctttatcgggcttcatctcgtgagccgtctccgttgcaaatgcaggattatgcgtcccaggccatgccacagggcattacttcatcttaccggggctcatcgcgtgagccatctccgttgcaaatgcaagaatatccgccccccaccatcccccctggcggtatctcatcctatcaggcacagtcgcgtgagccatcgccaatgtatatggaggatcatccagctgcgagtatgccatatggtagtatgccatcttatcgggctgcatcgccattacaaattcaagataattcgtctgcaatggtcccatacgggcgttacacatcttaccgggccccatcgcgcgggccgtccccgccgccaatgcacgagcattctacaatgagttcgcatggtggtatgtaccgggctccatcgcgtagccaatcaccactgtacatggaggatcatccacctgcaccagtgccgcatggaagtatgtcctcctaccgggctccatcgccattaccagcacgagaacatccatctgcactcgtctctggcgggggtatgtcatcttatcgggttccgtctcgtgagccgtctccggtgcaaatgcacgaagagcgggaagactctccccctccccctccgccgccgccacaccgagtcgttgtcggtcgttcgggctcacactctcctcagcctccaatacattctcaaacacgaagtcattcgccgctcccacctatgcactcatctcaagatcgcgcacactctcctaacccgccatcacactatccaaacccgtcacgatcccccacgccattagttatgaatgaccgttacacgacactcaatcgaaccccatctccatctgcggcctcaatgcactctgctctttctgcaacctcgggacaatccgatatgcatggaaatacgccatctccgctccgagatgccatggaagatgttatgacttcactggaagacatgggtctcccacgccaagaccagtcgccctctccgtccccggtgttcaacgagccctggtccccagaagagtttgatacctctcaggaaaggaccccccaggggaacagacgccgggatttaacctcaatgggcttcgaaggagacaaagaacaactgcagggcggactcgtccatcgaaacagcgtttatagccatgaccacatggatggtccacctcaactgaacaattatgttcaaaggatggagagccgcctacgtcagctggaagatcaaaatcgatcgtctgaggatcgaacaggcggtcaggatgacaacggacctcctccccctcccccaaaacatgccacctaccacccgcgaaataattctataccaggacaatacgctcccctcaagacccggcgttccggccatgatctccgcggtgatattctcaaccggacatttaccaataagtctagtaccaccaattcgtccagtggaatgcaaagcaatggcacatccatgacaacgagcacagacaaaactggtcaaagtgtgatgagtgggttttccgcagggggattcagtgcgacgagtgcggggagctttgctagacgaggcgggagtgagaggccaaatacagctatggacactgtccgctctcgaggatacagtgatgcccgcccggaaacgccattcactggtgtttcctatcattccagtcataactcctctcgccaaggtgcatcatcggctattccgtggacttccaccggcctggactcgacggatcatagcggagtttttggcggtctttcgacgccaaaaagcaaaaagcaaggctttttcaaaaagatatttgaaacagccaagactggtgcagccagcgcaaggagtagcatttcggtcgggtcaaattctccaaccaagagtaacagagggatagacgccgtgtcaccggctccgtctcactcgcaccgtaatagtggtcgtgacatgggacttggaactaacgccattgactgggtgcaggtgcgccgtgatgttaaccgagcgtcgtctcctagccgaaatgaaaggattgatagggcagaacgatgccagatgatggaccaccctgttatctactccgtggaagagctgtatgataccgcagagggcgatgaaagcattgatgggcagccgatcactgagccaacgaatttccacgctgccaatcttaccctcgttgataagagtgcacgctttatcagcagtctacctccaatgacgaaccccatgagcctcgcccaagcctatatttgtcgaccatacaagagtgatgttcagcgtctccgggccatctttacctgggtcagcgagaaaatatcgtgggaggaacctctcgacggcgtcgaggttgacatgaagagacttctgcaggccaaacgaggtaccccagaggaaatctcagtattggtgcatgagatgtgcacagccgttggcctgcatacagaagtcatccgaggattcctcaagagccccggcgacgcccttgacctggaaagtctctcccgccccaaccactggtggaactctgttctggtagacggcgaatggcgctttatggattgcgcacttgcaaatcccacaaatcctctgcgcagtaaattcatttccaacaactcctccatatcggagagctggtacttcctcacacgcccgcttgatctctgctacactcatgtcccactctatccggaagaacagcacatctgcccgccaatttcaccagatgttctgctctccctgcccaccgtgtgcccgccattcttcaaacttaatatccagatgccggattatgacacgagtttcctccgcatcgacggattggaagtcatgcaactgcgcatgatagtacctccggatgttgaatgtgctgccgaagtcgaagccccgggattcgcccgcgacgtagatggcgacgtgttcgaaagcggagacattgtgcgcaagcgcgccttggtccagccggattggatccgcggccaaaagcgcatcacaatcaaggctgtgctgccaggcgacgaaggccagggtgtactgaaaatttatgccggcaagaaagggctaatgcactccagccgggacatccctcatcccctagccttagccctaccaatgacccacacgggagagaatccaccttacgactttgtgctgcgccatcccacaccccacgcccagcgacacgacttgtacatcatgcagccacagtgctctcgcctggcagttaacaatacgtttgtgtttgctgtccgccaacacgcttctgctccagcgtccgccatggacgagagcacttccattggccgcgcctcaccgtccatctttaatcgtccggccagtgcgttgagcatggtgtccagcaccacagccggtggctcaacggtatcgggcgcctctaacgagttctcggcgtcgacttcggtcatttcctcgggcagatctacttcggggcgggacaaggctgcgaaattagcgatccaatctccgtccggcaaaattcttcgtcttacccgtaaagctgaacacatgatcagcagtgataatggcaaccaatctatcagcgatgctgtcgccgaaggcagtgtttgggagactgtcatcaagatcggtgagcgtggtatgtggcgcggtctcgtactagctgaccgagctgcgcgctggtgtgtattttgcgagtgggaatgtgtttgattttttactgttacatattatgggcgtttatcttgaagccttctgatacaccgggttcagaagcaggtggctctctgtgtttttttttcttttggcttttttgcgttgtgatattgcgggttgcatatttttggcatattgtcctcctggcatactagcatttgcatgaggttagcttggggcattgcatttgcatccgatctgtccagaatctatttcaaaaatctggatttcggtgttagagtctaaattaataatagtttgagaaacccaagtccgcataagtaatctatagcataattcaaaatgatatgggaactggctaacaggctaaatagacatctgacatctagtcacaattcttcgacatatttcatttataatttagctaccgccgcgcgcagcaatggagcaacttgcttcctactcccagccgcattggtttgcacccacagctgcctccagtggagggaatcctcgtccacgttcaatgtagaaagacaatcgcctgtcagctcagggatatcctccccatcgagcggagaccattctacaagcccaagatggtgagaggattgctcaataaacctctccacacccttgacagccgcttcattgccacccgtcacgatgacgaatagctcgcgacaaaacttgtcgtcagtgcccgtgaacgccgtcatgataacaagcacatccaagtctttctcggcagaagccgcgaacgagagcgcagcatcaaggaacttctccgggccacctgccttctgaacaagccatcgtatgggcttgacggcagaacagaagcccattttcacagtctcccccgaggactgtgacgtctcaatccagtctttataatcgcggttcaatatttcctccatcgtaagaagatcgagactattcagctttgcatgaagaatgctcttgtagaacgtttccagctcccaattgccttctgaattcgctgcagcttgtgattctccctcgatttgagatcgcaggaattcgaccgcctcacgatctacatcggtcactttgccttccgcggtgagatttaaagtatcaatcagcaccgccgaaagagcaagcttcgcaacctgtgtcatttccggggtcgtgtcccaaagtttccgttgtcgcaactctcgcgtgatgagcgatgcacatgacccaggtcccggttggataatcatcggctgcccttctggtaagccgtcaatgcttggcatgttgtgctcgtcgatgtggtggtcgatacatcctacagtccggaaggagacacccggcaacccagttaggaacccagagcccttatcggtctttgatggccgcgggaacgcgttccagtctaccagcgttgcatcggcgagtatctggtgccacacatgctggtcttcgagagactgcgcgaagtccgcgacggtcataacatactcgggtagaaaattgcccgcagactgaagggtgttctcgaattgctcttcactcttcagaggggggaaattggttgatgaccataatgcagccgagaattccggtcttagtcgatacagctctgtcccagcggggaaattggacaggtttagtagtgggatatggggtcgtgggctttggatcgggagccggttgttcgcgcagtaagagtagatgatcgccgagacgatagagtcaaggtcggcagagggattgccgattacatagattggaggctcggttagagcacccgagaggaagtgaaggtgcacttggcgggcttggcgtaagaactggaggagagtcatggttgttgaatcaattgatcgtagccgatatccccgcgaacagatatccgacgtcattcattcaattgctgacacatcggatatcggattgttgccttaaacacaaggccaaacaatataaattggaaatcgcgacatcctaacttgacaacaccaaaaaccatgcttagaacaatgtctctcccgatacagctgccagaggcgttcgccaaaatcccacgctacaacattttataccctactccttctcccatccaccccttatcctcaattgcacccccaagactctccccgcaccaccccctcatcaccatccacgccaaacgagaagaccactcctccccactagcctgcgcaggcaacaaatatcgcaaactagaatacatagtcccagacattctatctcaaacacccctccatcacagccatgagaacaacccaacacccccaggcccgcagcaaggcggtgcagcaacaaccctcgtaacagagggcgcaatccaaagcaaccacactgtgcaagttgtcgctctcgcacggaaactcggcctgaaggttgtaattcttctgcaccgcggcacaggcggcggacttgcagcagccagcgacaaggaagccttccaacacagcggaaacgtgcaaatcaatcaccttctcggtgccgacgttcgcgtctgcgaagaaggggatccgctagcgcatgatgcgacgcctcttctcgatgagttgagggcgtccggacagaatccgtattggatccctggtggcgcgagcttgcatccgcttggtgggctggggtatgcgcgcgcggcctttgagattgctgcacaggaggaggagatggggcttggaggttcggggaggtttgattacatctttgttgcgtgtggaagtgggagtacggttggtgggttggtggctgggtttaagctgctagacaagataaggggattagatgtgtcgaggaaggttgtcgggattcttaattcgccaactaagccgcgcgcatatcatgaaaagcgcgtgcttaattttgcgcggagggcgggagagttgattgggcttgatggggagcgggatattgggattgaggatgtgcggcttgatgatcgctttgttgggactgcatacggcgtgctcgatgataagagtaaagagactctagagaatatggcacggatggagggtatggtgctcgatcctgtttatacagccaaggttgcgagaggcatgatgcattgggtggacgagggagaagttgtagattctgctaaacccttagagcaggtcaatatattgttcattcatacaggtggacaggctgctctaggggcttatgtggatgttaaataatacatatcaataagatatatagtacagtcggaaacgtgagtaagaatggctgaattcaactagtattacacggtgacggtagcagcaaagaaaaccagtcatgacagacataagtcttgtggtatggaaaagcagaaaagcgtgaaatcgctggaaaacacccccggactcgccagtcccttctcttgtacacccttttttgaagattgatccgagcagaacgatagaagtataggagaggcaggtaaacaaaggactaaaagcgacgcagtaaagcaatcagaatatagttaaaaaaaaccgaacgagacgtggtcaagttttgaataagaacaaaagattcattgggaaaaaagtaagaagaatcagtcaaagttcttcgtcctcaaggccaccattagtgccgtcgagtttgggcccaccctgcggaccaccgttttcgccattttgaatcgattcctcttgaacagaggcagcacgactactgtcattactgaccacgagggcctccagggcctcattagcatgggtattctccatgggctgggtctcagcttcagggtcaatctcttggttggtcaggtctgcaaatacatcatctaggttctgacgagggctgctgctcgcgaactggggatcatgaccgaagcgtggagggctgaatagggagggttccaggtcaggctgaggaggaggagagcgtggtaggaatgagggggattgagaagcggctgcatgcgggaggaaagccgaggaggaagtaggtgcaaaagcaggcgtggaatcgctcgcgggtaatgaatagtttgcggagaatgggtatggtgcagcattcggatctgccatctgagccaacgttggacctgtgccaggaggttgtccgctactagaagtcggtggtggtggttgcatgggtgcggattgaccagtagctgcctgtgattgagcatcaacagatttccttttggtaacgccaatgtgcttggggcgaagatgctccgggagatcctctggacgattgactccaagctgagccattattttctgttgcttggtcgggcgcggttttcgtgttgagagagattgttccagaattggagggggttctggtgcgacgggtgcccacttgtgtatctcctgccggaagaaattcgtctcaaaggtgagaagaacctcagcgccctcgattttgcgaaggtagaatattagagtaggcacttcctcagtcgttgtgcaggcagcattcgtgaagccatgcaggaaatcacgaaaggctgtcgcttgattaatgatactctcaagaacttcttcttcctcgggctggaaaggcaaagttgcgatctccgcgtgccaatcttgcagatcttcaagcttgggacgagcagcgtcacgcgggatcttttgacgccagtcgcagattgggcaagtgtacttgtcgaattccttcactttacccctagcaatcttcaaacatttcccatggtacctacacaggtcagtaaataaaccacaagctggaagttttttggcttaccattcgtggcagacttcacattcaatcatcattcctgcctcggagtgcctgcaaatacagaacacatctcgctttcgtgactttgggccccacatgttgttgggattgctcggattctcaagcaaaccttcgggagaattgtctcgagacgaaggctccacaggaggtcggtaactgtcctctaggtcgaaacagtacgagttccgcttcgcgacgtattccatatgggatcttagaatatggagaggcgcgttcgccttaccgaacagctttttcccttttctcatccagtcttcatggcgcttttgttcacgttccaagtcgatcgccccgatgggtcgactcgtcatgtgctcaagagattccatgaggtctcggatgtccttgtacttgggccgattcttcatctccgggtccttgctcttttcatacagagtctgtatccgtttttgcgcctcacgctgcttggtcaatatagcatcgacggccgcgagggtatcaggtgaaaccggaaaacgagacgcctgcgcagaaagagcttctaattgctgatagtgaacggcctcgacggacattaattccttggccttcatttcccacgcatccccgtgacgagcaagttccttgaaatgaattaagtgttcgttggtatcagagaggccgacctgttcagcaccagcgacaagttcccggcaatcggtaagggtcatgtagtggtctcgtttgcgcacggcttgttcaatccatttgatttggcgggagacttgctctaggtgttccagttccgggacttccacgttgaagtttttgccgcgttcgatgagttcttcaatctcctggaggggccgggtgtgcgggtgcatgagggcattattaatatcctgttggaatttctcgatttcgcgggttttctcttccaacaccgccatctgtggacagtcgaacgaaagtttatcagcctctgcctgaagggcgtagatatgttcaattctgcggacttcgcgatcgcgatcgtccagctgcgacgccttggtactgcccctgcgccaagctttctcgttttttttccggttctgctgcttccgggtaatgtagttgttggcttcttcaacccatttatcgcaacgctggacgaaggccgcaagatcttgaaggcctggcaagtggtatgggattttctcaccttcatttagcaagttatgaagggccttaagctggggcttcggttcatcctccagggttttgtcgagcttttcggaccatgcttcgggaattctggcccgttcttggactttctgcacgagagactgcaattcttcatcacccatgcgatatcggactgtgtgtcctgagccacacagcttctgagcaagagtttcgccacagcagtcataggtgtcaacgtgcgataaacagacagtcttgcctgatttgtgacaacggaactgagtgaggtaagcgtaggccttgcaatgttggcactggtaatcatcctcggaaaggtcttcattctcaactacgaatctcggctgcacatcatctgccatggagtcaggaccaaagcctggggtgcgagcagaaatttctttttgccggtataagaaagcagcccgatccctcagttcacgggcgcacgttcttgctagtgcaggcgcaagccacttagcagtagcaatagtggtatcacgtgcagcagcggtgagaagtagttcatcgtgggagaaacacgggtgcctgcggaagttctgaagacgatcaacacctgctgcaccgtatggttcccagtccgcaggcgcgaagttgactgcttcattgaaattaaaaccgtgattaaagccggcatggtatgcttgagggaacgtgagcacaaattgaccagctcgctgatccaacgcataaacgttgactccggccttgcgaagcttgtctggcggcatgagggtgacgagctggaaaagaagatcaggctggccttcgaaaagctccggaactgcatcccgcatggccgcctcaaaggcctctgcatcggcgcctgggattccgtaccaggtcttggtagcaccgaagtgttggtagttggccgaatacgcgtagtgatcctcattatgccagcagaaagtagagaaacacatccccacataaacccacggaacggtcatgccagagatatcagacttgatgtaacggaagagcgagtctccatagaatggaaggacatttaggttccaaggatctgacgaaaatggatcaagggggttccgctcgatagttgggaatccactaccatgcgtggtcgaatggatgtcggcgccgtactcgacttcgacggtctcatgtagatcaacgacaagcttccagaattcggcctccacgtcgtcctcggtttcgcggcgatgagtgttgagaactggatcgaagggcattttcgatgcgaagtacttcttcttgaactcgtttgccttctcctggaactgtttgagtgagtaaacaccgccgtcttcaaatccgaattctcctgtgccgactagacacttgggacagtgccagtcatgttccgatggtgtggtagtagagggatcgagacacgctttgtggtatccaagctcgcagccgtcgcatactagaataatcccttgatcatcggatttgccacatgtctcgcatttctgttcatggatcagtatatcatcagaaccctgacacgaacccccgcctacctctccagctggctgggagccatccttgcgcgatttaaccggtgctgggcgaaggagcgacatatgagaaccagcaacggttggaagggaatctagaagggttagacaagatttgcttcgaatattaaaagggcaaaaaagcgtacctttcttggggcgcttgctgcgtcgaccgcttccatcatcgtcgtcgccattttcacactgagaactggcctcgcggctgataccacgcttcagagactcctcatcttgaccatttacaggcgttgagacgaaaccatgctcggaaacgactttgggtgtcaatgtgccgttctctccctcccgcttgattggcgggccgttgttcacgggcgtgaaaggagagtgattgacagcggtaaagccaccgaggccggagttgacgggagtgaagctcgtgggtgctgggcgtgaagcagggggaggagtaggttcgatcgggggtgttggcttctctggggacttttccattggagtgtgtgccattggagaatgtgccactggagtaaatgccattggggtatgcgaagcagccattcgaggcaagctaggagtgtcatcgcgaattttagaaggcgtgccattttcatccaacattggcttgtgagtcatgggggattgtagaggcgaaggggtgtatggaccaccatgttcaagctcgagctgttgttgcacaccgggcttggcccgcgccaggtattcctcgtacggctgcaaataccgctggtatgagttcttgagcgaagtggacaaagaagacattatcttgccgctgtatccaagatcacgaccaatttcggcccattttttggtcttgcacactgattcaaacccaccacgactctctactgcctttttaagtttgtagagatctaatggtcgcttgtcgacgctgggtagccggctatagttagtcccatgctgtttgtgaaacatggcaagtccatcgacataattcatgttcgcgcggtttcctatgttcgaataagggttagatccgcactgcggtgtgatcctaccagctggagtaagctgggcgtggggccttacctccttcgaccgaattcagctcttgtcgacgtgtcttgaagtggaatcgctatatccattgtcagacgtgatcatgcgcggaaagcgacggtgggccggtgaaggagggatcctacctctgtatcgattgcgaaagtcggttgccagccctctggtggaaccactcggcaaattccatacttcttcccctccggagcgatcttctgaatataggccaccgggtctttgaattcctcctctgtcggacggaaggtcggggcttctgggataccatgaggacgaatgcgcttggatggttctctggggttgttgggctgtccgcgccgttccacggtggacaaatcgagaggtgtggacctgcgagcgctcaggggcacgttgtgggagtgcgacggatgggtactcgaggaccgagtcggctggcttgctgcggccgtcgaagggggccccccccgggnnnnnnnnnnnnnnnnnnnnnnnnnnnnnnnnnnnnnnnnnnnnnnnnnnnnnnnnnnnnnnnnnnnnnnnnnnnnnnnnnnnnnnnnnnnnnnnnnnnnnnnnnnnnnnnnnnnnnnnnnnnnnnnnnnnnnnnnnnnnnnnnnnnnnngcccgagtcggctggcttgctgcggccgtcgaggtcgccccggcagaggccggagctcccattgttcgaaatggggcaggcgattaggggatatgtttgattgagcgcgcctgtttgaagaaattcgattaacaatgaccgtaatgcgtcaacggcagggcgtgatgatagatatcaggaaaggcggctgccggcgttcctgtcaatatgaccgaagggtgaaggatcggtaacgaaccaaaggatatgagagaatggatattgaggacaaacgaaaggaaattttgactcggggcgaaaggcaatagaacaagaaaagagaggcccaagtcgcagagaggaaagaaggatagatgggatagaaaccttaagagtggaggaatgagattatgtgcagtaaagatcgactgggggtggtactccggaagtactgccaggttctttttgtgtggccagccagtacgaaaggaaccaatgagtgactccggggggacctgccaccagccgcgatggtaccgatcagtacggtaaaggagttactgtaagaatgagctaatccgagctcaggaaccgcctgtaccctgactttcacgtgaaattttagtaattatactgcaatgctgcaaacggggatcatacggtgtctcctaaataatttcgtgtacggaccgcagtatttgggagcccaatgttacgccgtagacctatggtgtatggtggatatccaaatatagtgtcttgtgacatattaacttgatagagggatgtgcctcggatactggcgaaatattacctgcgtatagactttgtttctataattgcgatgtttcaataatggcttgatatgtattttattccggtttattgtctttttgatatcttcaaatgtttatcaatggagttgtgacatagttgtttgtgagactttcagtaggcattctttgcacatcccttcgatacacataactatcgtcaggtaagaactccattacatatgtaagtccctatcatccctagacagcaatgcaattccatttccccttagaggggaaaaaatactttatcatgtgatctgtatatcacggtaccgtttggacccgcacgtattcgataggcagagctaatttcaaggactcgacaagccgacaacattgaattgaacatttcaatgtcaaaaactaaaaaaattcctccaaatcaaacatcatggaggagtctgaaacccctaaaccaatcccggcatattactgctgttatctcctccggtcaaccgttcgacacgcatcactatatattggctcgacgccaaacccgatcagacgactctctcagcacaacggtgttgccaaaggtggggccaagcgaacggccagagataaattacgcccctgggaaatgaccctggtcgtagagggtttcacgagcagagtcggcgctttgcaattcgagtaagtcgcatgtgaattgtttgtatatatcgcgtctcaatttctcattgcgcgtagatgggcttggcaacacccagaaaggtcgcggcaccttgattccgaagatgatctagactccaagcctcgggctaaggccaataccgatgcgaagacgggcaaaccaaaaccgaaacctaaagcgcggactaggagatccctaacggcgcatttggaggatttgcattctctacttcgttcgacctatttctcctcttggccgttacgagtccgtttcttttgtgttgatgtatatcgtgtatggcgagcctggaatgaccgtgtgaatggtcgcttacccgacaacatcaaggttattctagatggagacaaccttacaaaaccgcccggtccaaagcaaggcgacgagttcgcacccgttggaagcattaacagtttatcaattgactacaccaggatagaagattatctcgaaaagtcaatgttcatgctggaagacccggatgatctgcagtgcacggtctgtaaagagtcgatctctccggacgaacaacaaatagttgtgtgtccacacccgaattgccgcggcacaagccatttattatgtctatctaccacattccttgatgcgaccaacggaccagacctcctagtacctactcatggaacctgcccggcgtgtaaaaacaccgtccagtgggtggcaatgatgcgcgagctaagctttcgcaacagagcagagaaagaaacgcgcgcaattctcagaaagaaggagaaacgtgttcgcaaagaatctgccgccatggaggtattttcaggatcccggtctgctattgaaccaaggtcattgccggacgaaccgacccaagacgacctagggccaaactggttcgaggaagtcgatatagaatctgactcagatttcgagggtcgacaaaagcgccgcccgacccaacctccatcaaagctcgagatcgtgatcgaagacagcgactgggatgacgcagaaatcattgaatgaccaaaccaaacccagttttatttctaattccttaattcgcaagaggctctaatttcctcaacgcgcccgtctcgtccagacgtgcaatgcaacctgccacagcactctgtatctcccgtgacacctcatcaatggatttccccgcatcgataatagacacatcctgctgcttctcgaagatcgtccggaaaagctcccgcacgcgggtttgcattgcctcgttttcatatcgctcggcaccgaacccaccacgttttgctgcttcctcgggtgaaatgctaaggaataaacatatatccgggcgcggtagaccgatttctggctgccatgcccagtccagtgatagtgtggggttcgctttcgcggcagagtaaacaaccccggaatatgagtagcggtctacaatgacggttgttccgtttgtgatatcttcttcaatgctccttgcaatttcccaccggttcgccgagaaaaggaggtgaatggaatggtcgtcttggtgggatgtgccgcgtagatagctatcaatcaacttcccgatgggcgtcgttctgtctagaggagattattagaccaatgcacccatagtaacgattaatcaatacctgggaatcgaatgtatttaaccacatgcccctgctgcgagagagattcccgtagcatctcacactgactcgatttgccagcgcggtcgagtccttcgacaacaatgagcgctccgcgtcgcgtcggcggtgctgatgggcctgtcatgattgactggaatacaggggtgtgattatatgtaaatatctgagagttgtaggtgaggatcctcaattcctagtgaaatgtgtgaaatagcccaaatgtttccgaaggatagcgagttcgatgtttatcgggaaatccgatttcttcgataagaacacgatctgtccaaacatggtctctcaataaccacgaacgccatggaccaagcgacgtccgcgtccccagcgatgaccttcagcatcctggcatctactgctccaatccttgccccgcgagtaggaaaattagccattccagggcgcaagaccctcgcaacgccgcaccatatcccgctcacttcgcggggcacagtcccacatgttgcgcacgatgtgatgcgcgaccacactgagatcaacagcttatatgctggattagaagattgtaagatgaatactccgagatggctacaagtctgttctcatcaatagctgacagcgcatgcccatcgggcatataaaagtcatcgcgaaaaaggaaccctcggtttacaggacaccagtcgctgatcacgagtcgcccttgaagaaattcatctgtgtggctgaggatatgcctctgatcctaggcccgcgtcgattccctccgatcccatgcccgcccgcgaacacaaacacttccatcgcgctgctaacatcggtcgggttcacccagttatctgcgcatgattatgtgaaggcgattcagaaattgagaccagacattgcggtcgggatggtggacctggctaataagcagcctgggtctaagaggcgagggaagatggttgaccggacgcatgcctggacacgcgatgcattggagcagctctacggggacgctgtggcagagaaggacaagtcaaagagcgcatacttcgcaccggtactgcctcttgataatgcgcagcagtctctctatctggatgatttggagagcgagttccgctgggatatatccggcctggcgctatatgagtctgcgtcactggaattcgtcccagagtcgctggcgggtctgcctcggttgctcttcagcgagcccgagactccccacactatcctgcgtgacatatcccttggggcagacctcctgactacacctttgctcggcgcgtcgtcggacggcggcatcgcgatggaattcgtcttcccagctccagctgccctgcaagagggcaagtctaagcctcagcctttgggaatcgatatgtggaccgctgatcacgctaccgatatatctccgctgggcgagggatgtgaatgctatacctgcaagaattaccatcgtgcttatattcaccatcttctccttgctaaggagatgaccgcttgggcgctccttcaagtccataatttccacgtcatggataccttcttcgcaagagtgcgggatagtatccaacatgggtccttcgagcaggacgtgcagacgtttgctcgtgtttatgctccttcgatgccggagagtagtggagaaggtcctaggtatgtcaattgccaattttcaatgtgtttttatttcaaatcactaacggtcttgccagattacgcggttatcaactaccggccaacgggcctaaccagccccgacgcatgcccaagatatatggcgctcttgacgatgctatacagaaattcgccgatgcccagtctgaaatcgctaccccggacaccgacgcgagcgggctcgaggaacacgggtttgctgagaagttgtgatggcagcggggagaatcgcctccggcaaacgcttgcatgagaaacggtacgtatttatggaagcatttgcttagcaattagcgtatgatatctatagatcaacacaaaatatatatactggattgttacaggggcccttctttggctaattcgacccctctgtcttacacataaggcatcaatttcaatttaccagacttaattctacacttttgaattctactttacgtacgcggtagtcaaaaatcccttaatgatagttatggcggtaagctgaatcctgaaaaaccagacagaggggggtaacaatgccctataaaagcaggagtgcacgcatattcataatattcatctcaataggatggggtcaagactagtgtacataaatccagattttgtgccattcttagtctatatgtccaggcttgcccccattaaacccccaaccgtcaaccgtaagaacactagggtatatctttatcctgatttgtagaaagacgcattcttaaacctcctcgcccgccaagacccgccacatccacttgacctcgtcttcctcctccttggagccctgcttcgtaccggcaccgaattgctgaccgacaacacacacaagccaagcgtcgttcttggtggtgtccaggtaggtttcggtgggcgatccgcgggggtagatgcgacgccattcgtcccagattcggaacgcctcctcaccccacgcacggaaactcacctcctcgatgatcgttggggtgacgatctccttaccgcggaacacaccccaggtaacagcgttgacactctcggggttggaggcaaggtcatcgagttccatatctgcaggctgggttgggagcgaggactcgaaatcgcccttgatgtttgtggcgaaccaggtgagcttgtcgcggccgtgcttagcgaacattggcttcaggatattggtgtagtcgtcgttcgagcagaagaactccacaaatggcttctggaagacgaagccttctcgttggggaccccagccgaagatggggtggtcattgtgtacaccgttcacagcgggctgcgaggccagtgtccaccagccgcggccatcaatgagcttcaacagctccggtcgaatcagctcagtctctgcgttcaaaccctcaccatcctcttcggcaccaccctctgaccaagggaccatgtgtagctctcccgagacatggcgacggaaaagggtgctcatgtccttgttgtccaccgggtggccccatagcctacgtgcggagttggcagtgacatggagcgagggaccatagccgtcgatctcaccaaaggcaggtgagcgagcatcaccccatcgtccgttggggaagtcatcccatgttgcttctctgccaagggcaccgagaccctcggagatgagaagagtagtactgcggtttggcgggggtgcaggcacgcctgcgctatctgcgcgggcctcgtggacggagtcctgcgatgacccgtggaccgatagcttgtcgacaatgacgcggttgcggggttgcgagttcatagaggacgcacggcgtctgcgcgaggcacgttcagcgaaatcgagtggaatcgatgcaggaccatcctcgatagcattttccccagcatccgagtacgacggaatcaaatcgcattgttctaggatgaatgatactgtcttctccaagttcaaggtgtagaaatggaatcctcgcggtcccggggagggaagctggctcataccacccacaatctcgctaacaatatccacacccgcgcgcttgaccgcgtcgtcgtcgtgtttcaattcttccatgcgtttggcaatgggaggtggaatcgtgacatggctgagcttagtcacgcgggtgagaatcttatagctgtggatgggcatcaaacccgggatgatggggatagtcttgaaagcaccagactcatggttgcgaagcatgtgttcaaacttttggtaagcgtcgaggtcgtaggtcagttgggtcatgatgaaatccgctccagccagtgtcttctcgaccaggtaaggtatatctctggccggatcctgaacgtcctggaacgtgtcggcgggatggccctccgggtatgcggccacaccaatacagaagtagtcgccatgtctctggcgaatgtatcgtaccaaatcaatggcaaaagtgaaatccttgttgctatcgtcctctccatgcatgttatattcctcgctgcggggcggatctcctcgtagggccaggatgttgcgaattccgagaaccttggcctcatcgagagccatatccaccagctttcggctcatgttcgtacatgtcagatgcaagacggttgtcaactgcagttggcgctggcatacttccgccagctcgagcgatcgtgcggcagtgctaccaccggcaccccaggtaaccgtgacgaatagaggacggagtgcttgtgccatccgctccagacgcgcggacaggttggcgaagccctatagtaggccatattagcaaaatatccacgactgttcagcaggcggggtaacccccaccattcgggtctttggagggaagaactccaaggaaaagtagttggcatctggcggcagagccgcgatcttctcggtgatcttcttctccattgcgtcctataagtgtatgggtcggcaatgggaggggttgaatgaagaagagaggattcggggcaaaagtggaccatgtcaccatctgctccagtcgcatcgggaactatgatgtctacagctgccgactggccatcgtgcatgaaaggtctactgcaaatacactacatggatttaaaggcttaaatactgttcctatgcaaggagtaactttatcttgatcccgaagagctagagaaaaaaaaaactgacagtgcaagagatgactcagcgagacaatcgttatttttccccggggcccgaggtctcatcgggatcggcgagcttaatgcgagcacttgtttagcactcatgtattttggcgtcggagaaggcatgatcttttgaacatatgtagtctctctttttgaactccacaagtttaccaattcattcacggaaaaatggcctcccgaccacccaacgttctccgctatctccgtctccaaacaactcgacacgctaggtcgcatgcgtcgcgacgaaccatttccactccatcccctccacagccaccgaaaccgtcacagccgatccctaatgactctcactctcgcctgcgtcggctcaacgaccgcctccctcgctttctccgcacatacactacacccttattaggggcgccggtcacccatatcacttcattcctaatacttcatgaaataaccgctattgttccaatatttggcctggttggtgcatttcactatggtgtttggatgccggatcttgcatcgcagacaggcgagaccaatgccttcgacgaaggagctgcgcgtttcggccgctggctgaaaaagaaaggttgggtgaatgagtccgacgtgaatactgttgccgatcatgaaaccactgcggagaagactgtggaccgagcaggtgttcgattggtgctggaatttgctacagcctatgcggtcacaaaagctttgttgccagtccggttggcagtgagtgtttgggcgacaccgtggtttgcaaggtcggtattcacaccgatagcaaagctagccggacgtctcttcggcagaggatgagctagtcgagcactactactatgataccagagagaagtatattcataggtctatgaatttgtatactgtgtattttgtcaagccattggacttcttcctcagaactgctgctttacgctatgctacaagtgtccgaacaagaaatccgcccgactagtccacttaaaggcgaagaatttattcgtaaacccaagcggcctgggcggaggtgtacttgaggacctcggaggcaccgaaccagagagcaatctccttcttggcgttctcgacggagtcggaaccgtggcagacgttgcggccgacatcctagtcaaattgttagtatgtaatgacacgatctcagaacatacggggttccttacgatggcgaagtcaccacggatggtaccgggggcggaagccaaggggttggtggcaccgaggaggacacggccggtcttgacagcgtccttaccctcccagaccatagcgcagatggggccgctcagcatgtctagagctgtgttagtgtatctggatttgcggaaccattcggacgaggaaactaacaggcgacgagacccttgaagaaaggcttggtggcgagatcagcgtagtgcttctcgaggtgctcctggctaggggaggtgagcttcatggcaacgagcttgaagccacggttctcgaagcgagagatgatgggtccaatgaggccacgctggttgatgctgttagtaaatgtcgttcaattgcggagctcttccgggtccgttatgggttcaagtcgaagggggggggtgtgtccgtacctggacaccatcgggcttgatggcgatgaaactagagcaattgattagctttaccggcagcgaggggtaatagcaatcgaaaaagaagggggattagggaagactgattttgaagcacatacgtctgttcttcgttggcggacattttgaatgtatgagaatgataatcaaagggtatggagtaggaaaagagagcggaagagggaaagattaaatagaggcttttaaaaaactcgggccttcccacttgggccgttgattggtggccggaaaggaggggtgttgatgcccgatgcctgaattgtaaggcatgaagtggacttttgtaactaaatatactcttttcactcttcgcttcatggacccgactacgaagatgaaaacatctatcaactcgaaaataacagttcaattctaataacagcatctaaattcaagccatgattccttcaaataacgactcgcgtctagccccgtccccagccgtttcccctggcaacttcccctgaacttcagcaacgtgcaatctcccaactagctcccaatttctagtttcaagaccctctattcttcgatgcagtagaataatttcttgcaagcctctaagtaaatgaacagcggctgctagggggagtcgccgttttcggcctctgtatactttgcaaacagctaatcgtcagggcaaaagctgaggggagatccagctcgacttagctggcattacaaataaaggccctccatccacctgaaaagcaaaatacacttagaactatgtactcgaagtatatatgtacgggttcaccatgtcaaatagggagaactcaggctttattatctcggtctgcaaacataacgttgtcttgacgaagatcgttgtggacaagattcagggcatgaagatgatcaatgcctgccctgacctgctcgaggcagctttccttgtcgaccgagcgcccgtccctcaggcggtccccgagcgtatccgcgtgtttttggaagcagagcccggtgatccggtcgtctttcaccacgcagccaagatagcaggtgacattttcatgtgggtgttccattgggtattcccttaaaaactggcagatatgcgcttcctcgagcaagtatttgctgaatgcctctgatttgtcgtagcgagtgagctggggctgcttgatctagacgtccggactgtgagtgtttttgtatattgtgaggttatcatatagccggggccagatgtgctctggtgggatcttctggaagagtgattggtcgatattggcggggttctccagaagatgctcctttttgggctgatgggaccaaaaatagtcgtcgccatcctggaagataacgatcgtgtatagaaattctgggataccgctgctaaattcccaggtctctcccttatcgtaagatctcattttaataagagaagactattttttcttgaataggatttcaagactgcgaggcaatgaagaaggctggattacaagcatggagcccttttcttaagtgctagggggcgctaggtacggaactctgccataagttgtaaagtggaccaatgaagtatcaggtgatagcgtgcggtgaatggcaaaagtgagatattccacagaagagtgatttataaaatactgcatcccgaaccatttatctactacctacgcgcatataaccaaaaaagatgagtgacatgctactggatctaataactaatcctgacaagcattctccaatggaccaaggcttttctatagattcttgaaaatttactgggtggtggtcaagatcaaaacaatgctccgaacgataaggctctttgtcggcccaagatattgagttcatgactttgtcgttgaatcatacttatctctccgtctcccccttctatgtagatgatggtcaatgttcttttcctttttctttagagtgcaccatcgtaacacgcctgaaattcgtttagtcatttagatacgtgtactagaacttctaggatttgggatacttttcgccggaactcagtaagtccttgcctactttgctaatcaagctcgtccaatttatcgggcaaaatgcctgtgaggcgctgatgcgatactcgcccttcacaccatgaggtctggtctcatcatgccccctacagcccgcagtgggtccggggccccacttcgggttagtctaaaatctaggacagcacacggagtactgttagtttatgcaaatagtggctgtaatatagaatattgagcttgcaatatcacaatagtatgagcgagcagagatacgagtacatttttccattttaaaaactacataataagtacgtagtacaaaagacaaataaaacccagaaaaaaagacaccaaaaaggccacacacacccagttagcataatacagtccattatattgctcgctcttctcctagcctcatatcaagtttcttgcaggtagctccatattcctacctcatagtgcctaggtgcagcttttgtatggcctttagaatacctttgactgttgtgtttgaaaaaggaaagaagaaattccatatagctgagtgaccttgagacattcattaacctcacagaacggtaaaacagaacggtaaaatcacaatgtccatactcacatgtatgtctctctcaatagaacccagcagtcttcaaagatttccattcggctgcgacgtccaacggtccccgggcgatagagtcaccagccaaatcgacaagaacatactgcttgccggagaaaaagtacgcctgaagtttgctccttctcggcttaaacacaacagtatcgattgtcttgaaattggcttgtgccaaagcattgaagcgcaacgcgatattacccgattccaagagtatattccggttgacatcaattaaagcgtacctgtccttgcggaagaaacatacgacatgttgatactcacttcctttgaaactgaaaggcaatgctgcgtccaccaggtcaaagcccacatctttcaggccaggccatttctcctggaacctgaatggagtcaattgaccgccactgggatgtccggtcttagcattgagtctcacgcaacgagatccacagaaaaagtatgtatcaacttcgttgtctgttgcaacgaatgcggcatttatcggggcaaatccgaatttcttaagcccaggccaccatgaccaaatgtccctaggaggacttgggtcgatggtatctgtcatgacattgacgcgggcatactggtgatccttccagaagtaaatctcatcctctgaccatgtaagtgggaaaactgccttggtcgagccggagaatcctagaagtcccttgacacggtctagagggtcgactcctactggaatagtcgagtacaggacctctccgctcttcgtaaagctcctgatgacctgctggccaccatcatcccgaactatccagtcggcaaagtcgttcgccgttgctttgtttttagcattcttaccgaccagaatgtgagcagggttaagtagaagatcgttttcgtcgttgtttccttcggcctaaattggatgttagcatgtaattttcgatggtacatttccgaaataattacaaagattgtaagttgttttctagtctcatcttcgatcgctagccaagtctccttgtctatcacggtgtattcgcctctaccggccgcctcacggatagcttgaaaggggaacccagggaacatgtgataccacgaggttggaggattggcccatggaacctggccaatcgtggcccagagcagagactctatgatgtttccagccgatttgtcataactgagtgaaagcaaatggttagttagtggatgccaaatatccgatgatcgggaatgaaggaccagcccgaatacctaccgcgacaggaacttgatgggcttcgctgaattcttgctctcttccattcggctgagcaacttggttaacagagaaaatatactggtctgtctatcctctgggaggttagcagggttgcgttttgggcctgcagtattcaatacataagattaaccgagacttgaaatgtttattggagaggatgaaaagcataccgacaagcatccaatggtcccgccacgcgtacacgactcggtcaatgacattgtcatctagcgcattagacgtgatagcgatatccgcggtctctttgagcagattctcaatcgaagaagtggtatcagacttgtaccattcaataaggaaaggctcagctttcttgttatccacacaactattggcctgtaggtgagaattttgaagctttaaagcattcccgcacacattttttgtcttgggcaaaacttactattggacaaaacttattgccaaagcctccagcagaccagactgaccagctccgccagttgcaatacggagaagaaccttctccttgcgggtgctatacacggcagagggagcaattcgttcagccatcatcggaggttagtgaaggaatagtcaacaaattcaaatgatattgtacttgttcttttctaaaatctgcagatatagatcacaaaggtatatatactctgtgccggtcattggtaagataatttccctcgtcgaccacaggggctagctgatgttctacaagtcgaccacagtggctggctgatgttctacaaatcgacaaaagtggctggctgatgttctgcaagtcgaccacgttggctagctgacgcattgacgacatgtctacgcagcaggatagtggatctattttgactggcagggggcagttcacgcagccggtggcccacttaaatcacgtgaaacatccactgggtgagctcacccggcacttacgagtgatctcgccggcctagatagtcgttgccgagcaaagcgactgattctaacttctaatgctgtgcaaagccccctcttactggcttattggcttcagaacgaccccgcggcttgatcaactcccttgcttttgtcataattctaggagaaaacttggccacgtgacacgtacgtaagaccttctgatttagttatagtttacttgcttcgcttcgctccgcaattattgcacagatactgtatgttccatgaatgtatagaataacatgactactgttaagttcttaaaggtgttatccctccctgattcgcctcggtggttgatgggaggtattgacgagaaatgattggtagaagtttggtattgttaaggtattgattaggccatcagtcacgtgttttaggtgggccactggttgggtagattgagtaggcgagcagattctcagttgctatctctgctcgtatcttatttttgtgcattgaattgtatgacacgtcatcctatattgcagctaggccgaactgtaaaatggtttttatcacctattcccgtatatcgagaattagtaaaagagagtagaagtacaaaggaagctactggcatggcaggcatctctaaatacgttccgacatcgggctctcctatggagactacactgaagtattggcgccggttgcatagatttgcatagactcgaaacaaacgtttagtcgtcaacatgtaaggaatggaaaatgaatcacgacagaaatgggactaaatcatttcaggtgtttgttcctactcaacttctgggttcgaatagaatgccttaatcttcctctcagcataagaatagtccgctttgacgtcctcgagcgcctccacaatccgtctcaagcatagctcagaatcaggttcaggtgagccgtccaaatcttcgttcattccgtagtgctgaattttttcgcagcctttctgcactttgacaagccctatagttgctgaagaattttttaaaaaatgggcgagttcgtttatctgtcggagttccccctccgttctatattgatttaaagatccgtcagcaatccatcataattgattattattactcaaaagccccgtgcataaaagtatcatttcgtacaaaggttcaactttgcacatttacttctagcaaggtttcacgcaaagttccagtgagaccgaaatagtctcgagaaacagaagggcgaacttacattgccaaccccattcgttcaaaagtctcttcaacttgctcgaaaaagccatagcagatactggtgctgaactctctatcgtcggggtcatcgtccatttccagaatctgacagaacacagaataatccactgcgtcaccgaagctgtcctccaagtcctggtaacatggttagcaactaaatccgagggcccaaaaaaagacaattgacattgaacactaacttttcctgtattggttgacatggtattcatttgtctgttcgtaggtactgtgtgttgtctggagatgactgaagattgtaggcgagagacgagtttatgtagacagcaaaaggatcgaccagtctgtccgagtgttcagcttcaacgtcaccgagtcgatcattgagtcgatcagtgttttcagctaagagacgatcacatattgctttttcgggtacggaggagcgagataccgcacaaacccacaattcgacttcgttctcgcttcatggtgacaggcgattatgtgatctctgaatagcttcatactttcataatatggggctgatcgtagaagtactacatatgtggctggtgtcagtcgaaggctgtgctttttatactagtgtgataccgtaagtgccaagaggtactcggcctaattagattagaggactgtggcagtagtgattcgggctgtgccaacagtgtttaccttctatgcatgtgactgaactaagcaagatctgctagttagttaacatctaactaccagcctgagcacggcagatcaatagaaaagcggtatagtcacagttatgtggtcatatcgcgaacgccgattggttcaaacgcaaagcaagttgattggctgttcagaagctgtagtggctgccttgttgccttaggggtcttaccccagctcaggccagctcagcttgtagcttctgttgacggcatctccacctctaaatgcaggtcaatcattgataaccaacgccactctgtcggagattgagggtctctgattgatcgtactatttatttcaccatggccaggagtctacctgcgccccgttgggcaatgttgctctccctggttatccttctcgtctgcattgtggtccccggttgtaaggttgccttttgccaaatcgcaagattacagaaagctaactcttatgctacgaacagttgcggtcaaacacaaggatttcaagacttgcgatcagtccgggttctgcaaacgaaatcgtgcctacgccgatgacgcctcttctcaaggcacttcatggagctcaccttacgagctagaccccgccactatacatttcaaggatggaatgcttactggagtcattttgaaaaccacgactgccaatgaaaaggtccggctacctctcacggtgtctttcttggaatcgggagcagcccgcattgtggtggatgaagagaagcggatgaagggcgacattgaaatgcgacatggcagtcaagcaaacaagaaacgatataatgaagccgaaaaatgggctatcgtgggtggtttagaagtcagcaagtcggccacgttgaatgcccagagcgaaactggattcacgaacgtcttgtacggaccggacgacaaatttcaagcgatcgttcgccatgcgccatttggagtcgaattccagcgggatggacagacccatgttcaattgaaccaccaaggcttcctgaacatggagcactggcgaccgaaggtagatgccgaagacggcgaatccggcgaagatgagagcacctggtgggaggagacgtttgggggaaataccgactcgaagccacgtggtcccgagagtattgctcttgatattaccttccccggttatagtcatgtatttggtatcccagagcacgcagattcgctctcgctcaaggagactaggggtggatctggtaaccatgagaacccttatcgtctatacaactccgatgttttcgagtatgaactcgaaagcccgatgaccttgtacggagccatcccgctgatgcaagcccaccgcaagagctccactgtcggggtcttctggctcaatgcagcggaaacgtggatcgatattgtcaagtccactgcctcctccaaccccctgaccttgggcgcccgctccaaaacagacacccagactcattggatgtctgaatccggtcagattgacctgttcgtcttcctcgggccgtcaccgaatgatatcagtaaaacatatggtgaactcacaggatatacacaattgccccagcagttcgccattggatatcaccaatgccgttggaactatgttacggacgaggatgtcaaggaagtcaacgccaaatttgacaagcaccagattccatacgatgtgatctggcttgatcttgaatataccgatgaccggaaatacttcacctgggaccctctcaccttccctgatcctacgggtatgcagcaaaagctcgatgaaagtgagcgaaagcttgtggttttgatcgatcctcacatcaagaacgcggacaagtacttcgtttcagaagagcttagaagcaaaaacctcgctgtgctgaacaaggatggcgaaatctatgatggatggtgctggccaggttcctcgaactgggtcgactgctttaaccccgctgcacatgcctggtgggccacgctacacaagtttgacaaattcaagggatcgcttcagaatcttttcatctggaatgatatgaatgaaccctctgtttttaacgggcctgacatgaccatgcccaaggacaacttgcatcatggaaactgggaacatcgcgatgttcacaaccttaatggtctcacccttgtgaacgccacctacaaagcaatgctggagcgcaaaaagggggagatgcgccggccattcatcttgacgcgctcgtactactccggggcccagcgggtgtctgctatgtggactggagacaaccaggccacctgggaccacctaggggcttctctccccatggtcctgaccaacggtatcgcaggcttccccttcgctggcgcagatgtcggaggattcttccataatcctgataaggaccttttgactcgatggtaccagacaggtatatggtatcccttcttccgcgcgcatgctcacatcgatacccgtcgccgtgagccgtatctgatcagcgagccccaccggtcctacatcgctcaggcaatccgtctgaggtaccaactgatgcctgcttggtataccgccttccacgaagcctccgttaacggcacgccaatcgttcgccctcagtattacatgttcccagaggacgagcaaggctttgccatcgatgatcagctgtaccttgcttccacgggtcttctcgtcaagcctgttgtgcaggagaacacgcatagtgcagaggtatatatctccgacgacgagaagtactatgactactttgatttcaccgtctaccagggtgcgggcaagaaacacaccgtccctgcgccagaggacaaggttcctgtgttgatccagggtggtcacatcattccccgcaaggaccgtcctcgtcgcagtaccggtctgatgcgatgggacccgtacacactagtcattaccatagacaagaatggcgaggcggaaggcagtctgtacgtggacgatggcgagacgttcgactacgagcgtggcgcctacattcaccgccgcttcaactaccgcgactcggtgttgtcgtcgaaggacattggtaccaatggacctaagactgctgagtacctcaagaccatggctggtgtgacagtcgagcgggtggtgatcgttgaccctcccgctgaatggaaggctaagaacatcgtgagtgtcattgaagatggagccaagtcaggctctacggcctccttggagttctacgagcaggaggccgggagggcatcctatgttgtggtgaagaagccgaatgttggtattggaaaggcatggcggattgagttctgattgatatctttcatttcttgcacaatacatgtatgcaatattcacgtcattagaagttgataagcctgcatatggttctttatataaaattgtccgatagggaaaacttaccccttcacaaaatctaacgccatcatatcgaggattacttctgatgcacagattctcacgcagttgttcatcaagaaaccttccagctttgaaattgagatatgcaacctcaatgctaaaagtttgtcctcgcgccgggctgtggtgccaaccgctgccgagtttatttagagtttctttgatgctttcgatcttcctatcgccttgtccgaagcgggccaggcgagtcaagctatcgaatgaccagcccaagccatgtgcggaattctggtggtcttgattatactacggctcgtgcacaaccatatttcccaccaatagaacgatatgaaattctaacgcattcatgtgcatctctcttgttgcagcttgagacaggattcttgagcagacacgacattgagcactatatcatgccaagttaacatagggcttcttggtggaaacatccaaacaagctcgaatgccctcctttccggccagaaatgtgaaatatgtcgcagcttaccatatgtccgaaggagattggagcagatgtaccggataaaggtccggagaaaggcctggagaagacctggagaaggcccagagcaaggccggagaaaggctcatcattgcacaccccgcatgccaacccacagtggttgtccgtgctttccgcagcaggtcggactctgactggatgcctatttacaagctcaccttggcaaagaccactattggtcgcccccacatacttctgggagtcactggatcacgcccttcaatgccaagcttccccgcatttcttggctattggaacgtagacgccaagactggggtaaacaatggcatctgaaatcattccgtcattctatttaggataaccgacatgatataactagctatatccctcgtttggttgacgagactctataagtacaggaccctcgagcgtggtagcaacgattgtatactaccaatccacagctatgaaccgcggctctatcggaaaagacgatgtcgagattgtcgatcaaactgctcatgtcgaacacattctcaagccttctcttgtcactcagattggagactttcgtgtcgtcggtttgacccccgaggatgcagatttctataacaactatccggaggacaaacgaaaaagagtcttccataaggtggaaatactagccattctcatgaatatccacctgactctgtgtacaggtcgataagcgtctgattcccatgcttgcagtgttatacttgatttgccacattgatcgtgcgaatatcggcaatgccaaaatcgaaggcatggtccaagatctcaagatgactgggttgcagtataatactgtactgtctatatgtaagttcatttcctacagccaactcttttgtaactgatgtgtaatggctctcaatttagtcttcattccctacgtcgtgttggaagtccccagtaacatccttctcaaaaggttcaagcgtccttcggtgtaccttggacttcttgtctcggcctggggtattgtcatgacatgcacgggtctggtccagaactttgctggtcttatgaccactcgagtcctacttggtgctcttgagtgagtgacaatgatgaacccctttctgcttcgcattctaaaatccttatagggctggtttcttccctggtgctatttacctttgctcctactggtacatgcctagggaattggcgcttcgtatctcatatttttactgtgccagtgcgctctccggtgcattttccggcctattggctgccgctattgccaagatggacggtattgctggacttgaggggtggcggtggatcttcattctggaaggtcttgctagtgtggtactaggtgttgcctgtttcttccttctcatcgacaccccggctttagccaagcgctggctatcccctgaagaaattcgctacctggagctttcaatgttcgtcaagcaaggaggaactagtactggggagtcgggtttcaagtggagagacctcaaggtggtcctgatgaattggaggatatatgtgcaagcgtaccttttattctgccaatcggccttgtcttacggtaaccgttgttcaaatccgattcgagacattgggctaattgaatttccacccaggtaccaagttcaccctcccgactatcaccaaagccatgggattcagctccacaaatgcccagctcacttccgcccctccatacattgccggcgcgatatctgccatcgtgtttgcacggttgtccgatcgcttctattggcgaatgccatttgtctgcatccccatggtatttgtcgtagtagcctattctattatcctctccctgaacggggcgctggaagcaaaaaaaggagtggcatactttgcagtcgtcttgtctgtcataggtatctatcccattcagccaggagctgcgtcttggaatgcaaacaacatcgccccagcgtctcgacgggctatgggaatcgcgctagtgaactgtgtcggcaatgtcggtggcatactgggtagcttcatgtatatcgagaaagagagccctaagtacaccactggatttggtctcagtttggcactcggtggggttggattcttggtagctttgttcctcgaatggacatacaagatgggcaatgcaaagaaggcaaggattgcagatgatgcaagagttaactacacggaggaagaattgtttgatatgggagacaagtcacccctattcaagtatgttttgtaaatactttgtgggcgggaatgaatttatgatgatgtttttttgatattacgatatgtccgataaaacgctcctgatatcttcaatctaagccagcgcaagcctcttaggcaggtgccatcctatatcaaacggtttcgtgctgatttcagtttgctctcttggttccttccgttctccttttactttcctgtctcccacatctcaaactttttcaatttgccccttctcgttggtatcaactcacttaaagagaaacacaccaccgccaccatgaccaccgatgcgtcaacaaccccatctgagtcgcagctgaccggacctggccctacaagtcctttctacgggatgtatggtcattactggaagtcaaacagggatgtgccgcccaccaaatggctgtaagaatcagtttgaattgaaccgttgaatataactaaccgattctatcagtcaggagagcaagaagctctgcgcttgtgatgcccatcaggcaagccagtggccgatggaacacgcattaattgtaagtggaaacgcccaaacagtccattccaagatgccaatcttcttggccttagacgattcctcgctgcgcctacaagtgtccctactgcccaaagttcgataccctcgatagtaccgagcctcaggtggtgaagctccgtgctcatatcgtacgtgaccatttggtgagactatcattcgtgaatgacttgcggcatactgatgtcgattagaagagaaaatcatatgaattccttgggttcgctgtcaccccggccagagtcacaaaagcccgcgtgccgtgagttagccttgttcaacttcaatcacctacttctaatcccattgattcttctagtaagccatgacgttggtagggttcagcggttcatggtgcatgcattttcgcggttatgggttcattccctattccaagaagagatttcgtaccacaacagaacttcaatcagaacgaatttacgtatctttgtgcttacccttttccatgattaaaaacctagaccatttcggcagaaacatgaattctatatgtaatcccatcttcaggttcctttgttttcgttctcaacttctatgatatcgtaaataataagcatacaggagatacttatcattgcttgtccctctttatagtgaaatagatactcggtataccggattagctagtgctcaaggcaataaaagtgtagtaaaataaagaaagttgtcctttcgaaactagcaagttcaagattcatcattattctcagccatccataaatgttagcaaataagcctcctaataccaccaaaaactagccacataattaaagcactgtgatttggaaattaccaatccgtttctgtcatcgtcgaatcgttttcgtcctggtttggccattcggaacgacccacaagctgccatggagcatagatcatttcttcgtcgatcaagtcaaacgggttctcgaagttaccatctaccaatccccagattgaagccagagagatccgacgatagtgcggatcctcttcctcttccggagggcagccgtcgtcactctcatcggtgaattcggcttcgtcgtcggtgagagtgtcttcatttatgcagcgtttgtattcggcaactatgccgtcagaaaaatcattttccatcacagtatctttcattgcttcttcagaaagctgctgttgaaggtgttggttttgcatttcgagggtcttcaatctgatgtccgtgaagtcgtggctcttcttaccatcctgagagaccgcatatcggattgaaaattcattctttttgttctccgaaatctcaaagctgccggccttctgacaacacccacattcgacagtgcagtggccatttgcatgcttgcgacgatcaccaataaatttgcgatcaaggcaacatccacactcacgtccacagcagcctcctctcctagcgcagtcctctcgaagaacacgatgcatgtaccatttgggatttccccgccagagctcaaaagctcgggtcaaaggcccatcggagaaagagccccggatcgtccaccactcgcgctcaactcgtttatattctttgtttgattcgctaagctcttgttcgactctcgctccacttagctgataatattcccagcgcatttcccgttgagcgatctctcggagcctagtctccacgtcgaggaactccgccaggcgatcttctttgccgtcgaggtcttgttcatagatgtagagttcaaatcgacatcgctgaagggcatttatgtctccagtctgtctgatctcgtgttccaaactgccttccataccacgcgtgaacttcttggatatctccagcctgattatattgggtccggtttcaatttcttggagaccttttatcttttccttgagtttaaattcctccttctcgagctcagctctgtcgtgttggattctaagctcctgattttggagttcgattctgagctcatggttctcaagtttgtttttgctgtgtgccaatgtaatttcatgcttttccacatcaaattccaattgacgccttttaagctgacgctcaagctcttggagctcgatttcctttgcggcttccgccctgggattgctcattttggatgttcgtgcgagaccaacgcttagtgaaatcagatgggaaaggtagataaagaggtaggagaatgtcaagtcggggttttggttagaattcatacatcgacgattcatcgtgatgtagtcccgtatccaatttgggtaacagctttgattatgtatgtttccgcggtcatagttatgcgtccgagataggcaaatgatgattaataaggtccctttattatgattggttaccataacgacaggtgacccacaacatccccacgtccctgccgcgggtggagatcggcacgctgacataatccagggcacccgccggccgcccggcaaaaaggccaagccgcatgcagtcgtgtgtcccgaagcttacgctttttttccctctttgacttcagttcttggttgtcaacagctttttctttgtcgcgaatatttacaatacgcggctccacacgcaatcgccgacccgactgctttttttattttatagcgaccgcgcataccccctgccatgtctcttttccaggccgcctttgactatgccgcacctgtcttgtacgtggtcgtaaatgactgacccacgggttcccagtgctaatcatgctcgtgtgcagccttataagctctccggtcacatcctatgccgaccaaatcttcagcattcatcgctcaagaagctcggcgggcttctccttagacattcctttgattatgctgatctcgtcgattctgaagtaagattccgatcggcagcgggttgatattcgaggcggcagttccatgttaacattattaggattttcttttggttcggcgagtactactcaagaactttgttaacacaagcaattgtcatgatcgtggtgcagatcacgatgctcaaggttgcactcgataatcggccctctgccggggtgagaaatggaattgagcacacacccttcagcggtggtaactccgatggttcatcctcaagaccttatgagttctggcagtggaaggctaccaagccgtaagtctcggcatctccaaccactgcgatcaaagctgattacccattttcgaagatattggatgtgtctagcctacttcgtcggaatgttgaccatcatccaccttaccccggtcgctcaatcgcgattctatatcagcctccttggctacatcggactcgccgtcgaagctatcctccctatccctcaaatcctcgccaaccaccaatccggctcgtgcaagggcttccgattctccgttattgcggcatggattctcggtgacactatgaaaatgagttacttcttcaacagcacagagaccatcccctgggcgttcaagctctgtggtatcttccagtgtgtgtgcgacttctacctgggcttccagttctacttcttcactcgcaacaccccatctaaaactccatcccactcgctctccaactcgctctctaactcgtttgctatcccacactcacactccaactcactctcgcacaatttccctgtctccgattctcactcccgctccaactcccaggctgcaagcgagtctatggagaatgaccgctggggtcatcacgagaaggacatccgcatggactgaaacactcgcatgatgaacttggactagacttcatatttatgtagataggtagcattggaaaacagcactatagatctgtaatttgaatgagataatgtgaatactatgatggtttcaaaaaaaatcatttcccggtgattctccgattgcgcgcctggtgaggggggggcttgccccgcgtcatttcgactgctctgctcgaacttctgcgccaacgtcttccccagtaacctcagatctaccgcttgttcttctccaaatcaatagtgcagctgtgtcttacacaatggccgacttgcccacagtccgcattggctacgtgcccggtacgtcagctttcccacagcttccgcatcagatgcaaaacagtactcccgtgtctatgctacagcctttgtctcaacgaagcctgccagtcacttctattgctctcgggcagaatatagctaacactaagcctttgtctactagagcactacctaaccccactccatctcgcactccgttccccggctgtttcttccctcccattcaaaatcgtcgcaactcccttcccatctgggacaggccatatgatcacatccctccgcggcaatgaaattgacgtcgccattggtttgacagagggatgggtcgcaggcttagccgggaagcagcaagcgagtcagacatccccggatgcagatggaggatacaaagttgtcggccactgggtagacaaccccctgcgctgggctatagtcaccggacgcaatcgggacgagatcacgggagtgtcggatctgaaggacaagagggttggagtcagccggttgggaaggtaagctatcaacatgagtcatgagcatagtatagcttggagactgacatgttggcctacagtggctcgcatatcatgtccttcgttcttgcgcagcagcaaggctggaaagctgactctttgaccaccgtccctctgggacccttcgggccgttgcgggatggtgtgtctggcctcgacgcctcaaagcccgaccaggctgcgaacccatcggctgagttcttcatgtgggaggaatttaccacgaagccatacttccatcctacagctgagagaccgaacccgccgcttaagaagattggcgagatcttcaccccttggccttcttggatgattgtcgcttctacagcgctgttccctaaccccgagaaagatcagcgattggagagtctcttccaggctctggatcagggaatcaaggatttcgaggctgatactgcacatgttgtgaagcttttggatactggtgagctcggttgcaattatgtcgaggaggatgcaacggagtggctcaaggatgttaagttcactaatgccacccgcggtgttgatgataagattattggaggtgttgtcgatgtgctcaaggtggctggtgttattgactcggcaatgagcaatgatgaagctatccagcgagtcattgggatcaagaggtagcttccttggccctcgaagacggagaagtcacgatataaacagtatgcagagagatctgctcataataccatccagagctagattctatatatgccgcattgacgtgcacaatgttacggtccttgatatcggggtcctgtatgcatattcgtaatattcgtttcaatgggataaggtcaaggccccgccgctacttcattgctaagccatctctcatatccgagcctgattgtttcaaaaggaaacctcactcggtcggctcagggtagcgctgtagccattcgtcctttgtgtagagctgccctttgtcggtcaggaaagcagtgatctttttgttgagttctttgtttaatcgttagcaagaacttcactttgatatcagaggtctattacattctactgtcatttcctcctatgcttgcaatgagtaatagttgcaccccctttcacaccacagagagcaccgtcgataacacctttcagcgtatcacatggcaatgaaactgtaaccggtgtcatcgacacgaagactctcgtatgttgcactgagatactggggtaaccaggtcggatcgccaaaagaagatcaaaaacaggaaatgaggaagattagacagtaaattgaggatgatcaagagagctcagatatgtgaaaggtgaggtaaatgtgatggataggggagatgggaggaaaaagagagaggagaaggagaagatgcaggtgcgtttgacttgttaccttgttgagacgagaatctcgagaatagagatctcatcgtcaactactacttcaaaaactgctccaacaactgctttaactactatttcaacaactacttcgacaactgaagaccgagtcggggcaatgaacagtccttagatagacggtagactttcaccttttgttcaaacaatgtcttccactcaaaattgtcatcggccgaaaaattcgaaatggttggcttgcggacagcgatacaatgaacgcatcgcgagcgacgagttggcgaagaattttaccaaaaagtagaaccggtaagaataatctcgattcctctgggaaacttgcggctatacttccatgaatcgggctttcggtaagtgatccgatgcattcctgcaggaattgggtgttcgaaatgaactgggaatgccctcgtgtagcatttgacgctaacccaatggaataatactgatctagatgtgatatgtacaacatagtagttgcattctgcaggggaatagcatcgaattcatgataaataaaggttcggataagccgaagcctgaatgtttcgtactcaagtttgtcagttatgtaggttgtggtattgggtttgctgatatatattgaagagcattggctggttgaatcttctatacaacggtgctctacatttaaaattgttatttaaagaaacctagtctaaaattcagcaagaacttaattctttgacagaaacaacaagctaaaggattttagcacaaggtgaacagttcgtcttgaaagggccaatggagtatagttcgaccaactacaacataatgacgaccaccgagatgaccacccagatgacaagggatatgacgtgtttaccaggcataggtacggtctctatagcagcagagtcaaatgaggatggcctagaactaaactttacatccacacatgctcatccctcggtgcattcttagatctgccctcagtcccccgacaacaacactggaatgcacaccagggcgcgtgaaacaccccacaatccaatcaaaatattcacctggctaaaccacctacacaaaccatctattcgggaccaaggaatgaccccgaacctccttttcgattgttagcgtggacatttggatcataccatgcgctgcgggcaccgggtaagcaagccacttgaatgaggaacgcggacatttctttttagaaaataacaaggacaaatatgtatatagtatttaacaatgcactatgctcattcacgatgaggatcggtgttctgactctcctttgtcgtttccgtccctatacatcctccaatcccatatattaatttcttcctaatacctacttaatctaacgcgagcagatactgtactgcgctcgtcactatgcgccggtatctgtgtcttcttgcttggtctattttgctggctccattcggaggagcacaggcgaagctggacttaaactcgactagcaacatcgttgtttactggggtatgtgcttgttggtggtttggattaattcgtacttacatgagacatactgaaggccagaattcattcaatggaaagggggatcaggcacagcagcctcttgcacactactgcgatagtgagtgaatgatatatcttcaatgtggtcgttcaaactaacccgagcctctagatgaggacattgatgtaggaactaggtcatcaggaacgctttcaaaacaatgggctaacaaaatggcataggtgataccaatggccttcaatatgatggtcaacggcccaggaggcgctccagagattgatttctctgttaccagcaaggactgcgatgtcttcgaaggcacagaattaaagaactgtccttcaattgcgtaagaacatatcccgtccgctgaccatttctagacggctgacagtatctaggaaggacatccaaacgtgccaaaagaagaacaagacgatccttctttcaatcggtggagcgacctacagcgagggcggcttcaagtccgacgaagatgccaaggacggtgcgaagctgatgtgggagacctttggccccaagaaagagaattcaaccgctcttcgtcccttcggtgacgccgccttggatgggttcgacttggactttgaggccaatgtccaacacatggcccccttcgccaacgagctgcgctcactgatgaaggcggataagagcaagcaggatttctacttgacatcggcaccgcaatgcccctaccctgacgaggcagacaaagagatcctcaacggtcctgtttacattgacgctatctgggtacagttctataataactattgcggcgtcaacaatttcaacaccgacagctcaagcaacaaatacaacttcgaggagtgggacacctgggctaagaccgtgtcacagaacaaagatgtaaaggtcatcgtcggcgtcccagcctttacttctgcagctagcacggggtatatcccggcgtccgagttggccaaggtgattgaatacacgaagaagttcgacagtttcggaggtgttatgatgtgggatgccacacaggcatacgaaaacgatggatttatcgaggacgtgcgagaaagcttaggttctgcgaatgattccggttcgtcgtcgcccgacccggtgtcaacctcggcatctgcctctacgtccactgacccaacgaagacaaccaccacaactaccacaaccaccaccactacaaccaccacaaccacgactacgagaacgacgacgacgacgacgacttcgccatcttccaatgcacccgtctcttcacactcatcctcctcctcctcatctgcttctgcttcgcacaagggagctgaagaaacaaccaccaccaccaccaaagaacataagcctaccgttacgaccaccacgcaaaagcctgtcgcttccactacccaaccaaaaccgactactatcgtcactacaaccgcaaagcccaaggcttcctcaactacatctgcggagacaactgcgactcccacctcgaatggtggccctaactcgccgagcgacgacgataattcagacgatggaccaaatgatgagtcgggtagtaatctcctcggctctatcctcgggaacgaccttcttggtctgctgggtggcctccgtaaggcgaacaaggctgctagcggtatcacccatggtctagccaacaatctctgacatgctcagcgcaactgcgcttggggttatgaccagaactgacatcgccataaacaaggccttagggagctgtgtttctctggcaatgaatgaacatgattgggccgttgagcgcatataaggaatttttacgatgaactcgaggtcaatttagacccgattcactcccattttgtcctttgaatcttttgccttctttatacccttcgatcttattactttcaactcatctaatgtcttgtttaccctttattcgataccctatttaatctttccctttgaagcttggaaaattgcaccattattgttgctttgtgtctttcacaaatgcgatcatacaatggagacactattggattggactcaaaatatatctataagctgacaggtatcatatggtttccatctatagtaactgattgaattcaaaagagataactagaggtatttgagcgccattaggatacttgtaagcagattcaacacattagagattaacatagacaccctcgtgctcttgtacgttgccccccgagaacacgccataataataacgttcaccatcgacaatacctaattaggccaggaacagaacgaaagacaactttcaacatccaatgatagtaagatccggacatcataccttccactcgatatcccaccccttcactcagcctcctcctcctccttggttgtagccaaggagaaccggcccttcgtggcgcccgattcctcgtactcaaccgtaacacgagacaagtgagcaagcaggttctcaattctgatctcacccttgtcgcgcttggaacgacccagattatcgagccactcaatcttgttcaagatgaagtatactagagcgataacaatagaaacaccaagcgaataaccccagattcgaataacagtgacgatatcggtccagccatttgtggtctcaacaaaatggtctgcgggcttggttggcatggtttggttggtaaaccaaccgaacagacagtagatcgtagccaaagcgtcgacgccgaggatagcgactaccaggtggattgatggccatgtgtcgatgccgcgagtgacgaaaattagccaattctctgtgagtgccacttccaaaaagagaacctcttgaatagatccccagttttggataatgcctccgttcttcaggaacatacttcctcggataacccacgtacccatggcgagaagcacaccaagaaggcaggaaatgacccagattttgggaagttgccattccacaggtcgcagctcgaatgatgcatggtcataggcaactgcaacggtcgcaagatcggcgaacaatgccaggaagacaataagctccacacggatgctttcattgaggatgatcatcgaagtcacgaggtagatctcaaggtgcaagcagagtgcaatgcggtattgaatatatgacttcatgcggtgaaagatttgacgtgcgaccttaatagagtcaatgatagttgaaagaccaggctcgaggaacacgatgtctgctgcggactgagcggcttccgaggcaccttcgacggcgatgccacaatcggcttttttgagagatggtgcgtcatttacaccatcgccggtcatagcggtcaagtgccctcgttcttgtagcatttgtacgacttggtatttgtgttccgggaacacttcggcaaagccgtctgctttttcaacgagatcactagccatggcaccgctcaaaccgccgtggattagcttgtctgagttatacaccttagtacccaaagccaacatcttgcaggtttctttcgcaatagcaatagcatcaccggtaagcatcttcacgctaataccgagattctgcgcttcgctgatagtttgagcggtatcttctcggggcggatcaaacataggtagcattccaagcagagcccaatcctcgccttctttctgaacagcaataccgagagagcggaagcctcgatgcgcaaattcttgggctttggccttgtataagtcagctgtctccttagagcaacttgtcaattgaagcacggctttcggagcgcctttggtgcaggtataccgaataccgtcacaggtggcaatagtgacaatgcgttttgaaaccgggtcaaatggcgtgaaagtttcggttgaccaaccccgtcgcaggatttctcgtgctcttggatactgcctaagcgccaagattgtcactttatcaatcggatcgagagattcaatattgtgcgatgacgcgagagcagcaacggcaaacatccagtccacgtcgacgccttcagctacataaggatcacgaatactcagtttgtttgccgtgagtgtacccgttttatccgaacacagaatatcgacaccctaattcgctgtcagtatctcataatagtccaatttgacgcagacttacggccagggattcaattgcagtcagcttttgcacaatagctttcttctttgccagataggcagcaccgacagccatggtggtagtggtcacaacaggtaaaccgacaggtacaccaatgatcaacaaagacagagtgtagtgaagcaaagtctgttgaccaggtgaagcgataggaatatgacggaagaatccaccgatccatgcagcaaggatccaggccataacgagaatcaagagagatgttccaatattgtccatgacaagttcgaagtgaccagcgcctttagcagattgcaccatagttgcagtgcggccaacgaaggaagtggtcgcaggcgtttgaacgacagcataggccttgccacgcttacagccagttgtatagaagatcatatctcccatgtaacgatccacagctagcgactcgcccgtgatagcagagtgatcacaagctaaaataggatagccacgtctgcgagccttcttcgcctggtgttcgtctttttccttggccttgctctcgccttctccgccttctccgccttcgcccttacccttatcggtattggttgggtcttcctcttcatcagactcggaccctccaccgagcataccctgctcttgaagctggttgaactcttcccagccatgttcatccttgacatcacagatgactctggagtccgcaggcacgacttgaccttcaccgacgatgacctaaatgattgataagaagtttgcgtataccaatgttccagctcatccaaaatagacttactacatcgcctggaaccaactcccgagcaagacattcttgttgagtactgtcacgaatgacctgcgcacgcagggcaatatcacccttgagactcgcaacaatatccgcagcctgcttctcctgataccagcccactgccgcgttcagacacaggataccaatgatcacaccaaaatcaatccagtcctctagaccagcagcaagcagaacagccaattccatgactatgctccagtcagtgcggtaaccaagggaggagttatatgcactcaccgtagagaattggtccttggaagtaagaaagaatcttagcaataggattttccttctcggatgtcatctcgttccaaccagcccgacgccgacggattggcacttcatggctagaaagcccctctcggacatccgtcatggtccaatcatcgggaaacttgccaacctccccctcgacctttttgacgcggaccttatgcttcttccacggggcataccagactcgtttctcgaccaattcgccctgttgttgatccgccgcagcatcccggaacgtcgaaacgtacttgacaagcttgccatactcgtccagactgttgtagtccccgctcagagatgcccgggagatacgtgagctccggcggcgagtctcggcacgttcggcttgaccgtcgccggacatgtttggctttataaatcagatcatagtccttccagtacaaacaggccagataggcacatacctttcaggagacgagatctgataacaaaaatgaatgcacgaagcaaaaggggaatatgaaaatgaagcaacaatgaaaagaaaaaatgaacttttccaatgttatattcgcagttcggcacctgcgggatgtcaagtattgaagatgagtgcaattttatctggagtagaaaagaagagaagtagctaggtagcgtagcgaaactatccaaaagaaatcatgctgacgtcgggccaggaagccctcgggagagacatctcgcatgtatgctcattgttttggtctttgtactcggtacttgaaggatgatgaaaccagggaccaaaagccggggaaccaggtctccaaagggacgagccgcggataatccgaagaactcccgctgggtcttgatgcatagaacattggttcgaccaatctagatgaagcccataacatcatagtcggctctaagatcgaaagaagctagtggtccaagccaggtacccgaattgacttcgagacaagggcattcacccatggatcgtggaagatgtttcctcggcgagggacatcacgacgatgggaaaggggtccaggtcgtgtgtctgcggctgtaggaccttgtgctatactgatgttcctacaggcatcaaaggtcttatgcggagatgatcatcgatcagtgcatccagctatggcgggacacgcattgggcgttgaacaccgtagctataataccattcgaagctatgaaccagaaagatccggggtgctcaatcaagcataggtgaacgaatgaactaggcccgtttctgctgtagagggcgagcggctgtccggatgtcaactgaagcagcaggtaacctgcgacgtcatgcgcatccattccgctgacagccggccggcggagtttacatccattccacgccaatgtttctgattcgtcaaaagaaatcatatggtcggaaatcgaaccgaaagtataagatggttatgagcaacttgctagcgagatcgttgcagtggagctcggccacacgtgaccctgttcagccctacacgcgccattacaacgcttcccagaactccccgaactaccctcccagagtgggtatggtatcgtccgatggcctttacctgcattcaaatcccgtccgaatgccctaacaaaaaaagcccctggataatgccaccaggtgccctttcgcccaaggtagcccttcgtagatgcacagaggatctatattcattttactgaacgcaagtggaagcatataaacaatctttcattcttcttatcatggatcactcataaaacatgattcaagcataactgacacagtatctatttggtcttgccggaaggaatgttgaagaagactgcaggcttaccaggggagtaagcacggtccacgcggtagtagcccttacggtcgaactgaatgatatcgctctccttgagatcagcgacgttgcagtcggccagacccgcctcacggaactcggtgtgcaggttgaggaagtcctccaggacgtcatcctcaccgagagaatccttggtcaacaagtggtcaaagtcgaccaactcgacaggaactaggtcctgtccctcggtggcaagccaagtcaccttcttctcggtcttcttgacatcgccagccatgtgcagctcgagctcaagatcggtaatgatgccggtctcggggttcgtggtgatcttgcgcacgatggcattgccccagttcataagagtgatctcctcgtccggcttgaagagcttgacatcctcctgctcgagaatgatcgagctgctgtagacaaccttcttcataccgacggcggcgttcttaatgtgcttaggcttttgctcgctgtaaggggtagcagggccaccaatcacagtggtcttcacaacgttcttggtgaagatcgcggtgtggcgtggggcaataggatcaatgtatttcttgttggtagcccagataagaccccagtcgaagttggtcacagccttggaggggccctgcttgaggatgaattcccggagagcaggaatggtcataccgcggcgacggataccacgaatggtggggaagcggggatcatcccagccccaaacgagaccagtctcgaccagcttggtgagcttacgcttagagaggagggtgcggacgaagttcatgcgagcgaaatcccacacctgcacgttgcgcagcttcatagtatccagcatccactggtactgggggttacgatcacggtactcgatagtacgcagagcgtgggtgacaccctccatcgaatcaacaatagggcaggcaaagtcgtaagtcgggtagatcttccatttgctaccggtgcggtggtgaggtgttgggttgcatcggtagatgactgggtcacgcatggccttattggggcagtcgtaggagatcttagcacggatgcaccaacgaagaccctctggggtgctgttcttcatatcctcaagatgcgccaagctttcctcgggggaaagatcccgacgcttgctaggcaatccgtcccatctctgggcagccatggtttctttatcggtatcatctgcgtaggcgtcgccctgtttgatgatctggatacagtaggcgtacaactcgtcgaagtagtcactagtgtaagtcaacttgttaggcttgatgcccatgagcgcaaggtcctccacgatggcatcctcgaactcttgcttctcgttcgaggggttggtgtcgtcgaatctagtacaagtcagttcagggtccttgattttgtttgctatttgtcttcaaccaacctcagaagcatagtaccgttgtacttctcatgcgcaaaatagtcgttgagaagagcggccttggcgtgaccaatgtggaggtatccactacattaaagcgaacgatattagtctcagatagattaaacaagaattgggtcccaactcacgaaggctcgggagggaatcgggtaacgacaccgttctcggtgttcttgagcgcaatgtcgtaactggcgccctccttagacttggccaccttcttctccttagcaactgcgttcatggattccacagcggcgggagcccaggggcaaagctcctcaatgaacctaaaccagcgggtaaggttcacaagggatcccttcttcacggccgcagtggcgacacgattgcctcggatagcaccccaaagggcaatgtcgggggtcgacagagagtatccgaccacgaacgagcgcatgaggaggtgagtatcaaggcgctgaagcacgggatcgagggccttgaaatccaggatggtcagggaatccaattgagagatccactcagtctcctattgcgaggaatagtgttagggttatttcggttccaaaaaaaagactcgaccgcggggtagtgactcaactcaccaccttggaatctttgccagtcaggaaagggaagtgcttagtaagttcctggatgacattggcagtaccaaagacagagttggaaccactagtgagctgcacgatggccttgtcgccatcctggagaagagcagtgtcctcatatgtgatgttgatcacgggggtgggacgggcctcattgatggaggtgacgatgagaaccgcaggcagagttgcagcctggttgccacgagtggccactttcaactcgtattcagacatggcgcagaagtgtagtgttaggagcaatgtgaatttctggcgggggagtcattatctacagtccccgtccggagccacatttctccgaccccgactgctttccggcagaaaacaattgcttcatccagccgatcagctcacatcaacgcttgccaacatgtcgtcctccggctcggtactgcccagtgcggcacgaggaatcctatcatcatgccggaatccgctgcgaaattcatcaatcgctcccgttctctcgactttccagcaggtccgaggtctcaagcacaaaccaaagaaggggaaagagcagcctaccaagagccgcaaagcaccccaggagttccggcaagccaatttgaaggatatgccgcagtattccctgtgtgatgctatgcggtatgtactggacacagatgtcagccaatagccgggccatcaattgacaccttcctttctgcaggtatatccgggccatcgaagtcggtcgcgagcccaccgttcaaaaatacgagctgcacatccgactgcggacaaagcgcgatggtcccgtcatccgtaacatgctccgattcccgcacgccgtccagaccgaatcccgcatctgtgtcatctgtcctcccggttcgaaagcggctaaggaagcgcttgctgccggtgccgttctcgtcggtgaacaagaagtgttcgacgccgtcaaggcaggcactattgagtttgatcgctgtctcgctcacccggacagtttgccggcattgaacaaggccgcgctgggtcgtatcctcggtcctcgcggtttgatgcccagtgcgaagactggtaccgttgtagaagatgtggctgcgcgagtggagatgctccgtggtggtactgtgtacagagagcgtgatgctgttatccgtctgcccatcgggcaattgggcttctctccagaacaattgcgcgacaacatgcgcgtgacccttgaccagattaagaaggatgcttccgcgctgaccgaccgtgtcaacaaggaggtctacgaggtggtgagcacttaattgatccttcttgtggaaaaatctctaacaacaccatcaggtactgagctcgacgaacggacccggattctcactcagcggcgagttccgctctgacgcctctcccccaacctccgccttggccggcatgtaacatactcaattttcttatatcctttggcgtgtacaaatttattgttttattaggaaaggacatggtgtatcatggtatcattgttgaactagaactttataagacgaaacgccgacgctatgtatgcaagccagtgccgattgccaatttccaggaacatgcacgttgtttttacagcttgaggttcttcagcgcggcaacggcactgacgtcctcacccataagctcgtagaggcgcagaactgccattgttctagcgtcacgtttgccctgtttaccacctgccgtggcctgctccaaggcagttttgagatccaggagcactgtagacttgatctttgcgactcgtggttgctgcgcaagcaggaagggatgcttctcgccgacccgggcagctatcgaggtcaaatagacaaatttctgcgcatgacgttccatcctctttaatgaaattgcaggtgtgccatctgctagctcataatcctcgctgtcttcactctcgccgccgtacaaatcggactctgtatctgattcgtccgatgtggcatgttcttgcgatgacttgtcctcaatcatcaaacggtgttccaactcctccacccgatctgcatagtccagcaggtctttgccaatgtcggcgttctttcgtagtcgccgcttttcgttcaacagctcttccacttcctggcgtcgcgcctcgaccttgtcccgtatagccttgacgtcgcgctggaaagaaagtacgccgacttttacaccttcgactttctcctctcctccgcggagcgcgctgcccaacgagagaaagtcctggtagttctcattgacaagatccaacagctccttgttcaagaattgctccagtccccgcaattcctgtcgcagatcctcgaggctttgatgtcggtttgtcaatgacgagaggaaattggccggatcgaagtcaggggcgaggaatgaggtgcgagatagcggttccgggaaggggagaccagatgggtcttcatcgaagtcggaggaggacccgtcggagtcgccgaactataggtcggttagacgaggtaccaatttgagtcacatgggttcatacttggaaccgattcatggtgcgttccgggcagagcgtgagcaatgatgaaggaacacttgggaaacgtggtggtgtctatgcctcgatataacttacatacctgttgagcgtgtcatcttcatgtttggaaaattcattatcagtttggctttgtggcccagtggttaaggcatcccgctcgtatcataatggtgcaaacgggggggtcccgcgttcgactcgcggcagagccatcctatttttggctttttttgcatagtgtacctgaggtgcctgaaccacactgacagctttggtggtcatcagggaagctgtccacccctcggatgatttacatcagacaaaacactcaacgcatgtcgatgaatatgcattgcgcatccgacgtggatacatgcgaaacctaaccctctcaaagtcctgtcccctcccagagcggggtcggtgtctgcgctgtctcctgcattacacgtagctgtgcgctaccgcaaccggtacagaagatggagtcggagacattgcccggtacaaggccttcgtcttccctacctcgacaagcatggccccgactacgatccctatcccatgcttctcaagttgtgcccgccgtcgacccatcacaccagacaaaccaacggtaccagtccatcgccgaagaccccaccgctgcatatcgtgctacggctttgcgccaactaaacggttctccgaggcctgcatcccgtcctattcgagtcgataatccctctgcccggcgcttgtcgacacctgatagaggcccggtgctagtcagggcgtattcgggcgatgcgcagaatagatctacacgacggtctactatgccctcgcgtcggttcctctcgttttccagctcgaggagctcgcctcccacgcgcccgtcccagtctgatgtcatattcccgacggataaggacttcagtattgagagtatactgcaggccatcgagcctgatatccgtggcactctggattccattgctgagatctgtgggcggagcaagctgagtctttccaacgagtacgggagccacatcgcgcctttgggtgagatctgtgctccgtcgagtgcgctgggaccggttgaggaggccgggccgagtgaggaacgacgtgccgatgacagcaatgcggtcattgtcgacgaggacgctagtccgactgattcagctcaggatatgcatccattctcctttcatcggtatctggaaaacctgcggcatactgcatctatgcaggagcagagtggtacacttgaccaaataactcagcagccccattctccattttctccgggcatggactccgcagcggaaactattgtgcctatcgccccggtcataccagcgacccctttcacgcgcgaattcgcatcaagacccaagcataacggacgtgatctacttgcgaagaatgctcctgctggcagtggtaaacagcagtcatatcagatggcgacaccggctgttgtttcggaggttcatctagaggcgattgcaaatgatggatcctccgaatccaatattctcccgcagtccgctctcggcggggaaagctcgggtccggaaatcactcaatccctcattgggtggctgaagtgggctgccactatcgctgggccggaatccagtcctgctttgcagtccgcggagagccggctgcgagctatgcttgatcgatcaggcaattagggtctccacagtgccttgatcacgactcatgttatgagacatgataatgactgatgtttacgatcttgcaaacaagattcacgatactatcgacacatctcaacatggttttgtttctaacaggttatgtttgaaatgtcggcttgtagacttttggtagtatacttactgctgggtattttattctgaaatttgcctagaaatattgcctgggaggatcaaaagaaaatatccaaattattagcatcctacgtcatcaaaggatgttcgcaggatgccaattattcttccctgttgtactctacgtccccagaatgactggttttcgccacattgtttacagcaaaagtgataccaatatagcgagtttcaatttgactcgagtaatggaggctaaagagtgaagcctaggacaaaaatctccaagaagtgccatcggcattaaaagcccaaggcaaagttaagcggaagccttaacctcaagacgcttgaaaccaccatcagcagcaacctcctgctgaagtgcagccatgcgcttctgatcaccaataggatcagtggagtcagcatccagaccccaagaaaggaacttattggtgtagttcgcgacgaagtccgcgtccaagatcccaagtctctttccatagttggtaaccttagtccagtcccgctgaacattcttcagatcgcgcgagaagtaagcaaacgaccgctcaaagatcttgcggttgacatccgtgcccatgatcggcttgacgtcaatgtactcggcgtacgccgccgcaggatcagcgaggacatcgtccgtggcgcgcttgacggcgcgcatgaacgcagccaccttctccgggttcgcggcgatgaaggcgtcgttcgcgatgtacaggatcgagcagaagcagcagcagcccagctcggcgagctggtcgatgcgcagcatctggacgtcgctgcggggtcggttctggccggcgagccattcttccagctcgaccatctgcacgttctcgagaccgatgccggcatcgattgtgccttggatgatggctttggttatgttcattccgcaccgcacggctgtgtagtcgtcggcggtcatgccgtagtacttggtgagttcgtcgatttggatctggggttggttgttagggtttgtttggaattgagtgtgagggagggaattcataccttgccgaactcgccaacgtatccgattcgcttgcctttcagcgagcggaagtcctcagtgataccgctggacttcaggtacacgactccggtgaagggctcgtcgaggagtgagccgatggaggtcacggggaagttgcgggccttggcctagacgtggtattagtatggttggggtgactatcatctgcggggaatgtatacgaaccgccagggtgtgaatcatggccttgaagcccatgtcgaccttgccgcttccgatgatctcggtgacatcggaggggtcattaggctcgagcagagcgaccttgagaccttcatccttgaagtagcctctggcctgggcgaggtagaggggggcgtggtacggggtcgcgtgcctttgagaaagaaaaaaaacttagccaagtcgaactacaagatcgagcacgggaagcccggaagctcggattctggaacaatgtcagcgtaccagttggtcaaaaaagtgatcttgtcggtagacatgatggcagaaatatcaagctattgaaatacttcaattgggtcagcatgccaagagagaacgcatccagctctactctacccatgctgttctccgttcaacctatgtattcaattgaacggaaagcagcagtgtgagtagagccagacacaaaacacaaaacaggggaacaatcaaagtcacgcatgtcctttcgctagtattgtctagatcaagttttgacagtataatctcagaacagccagccagtcggtatgggaaaaagaaacccaacacactccaggagactggagtaggtttatagttctccccaatcgactggctggaccgaacacctgtcatgcgagggcaacgactgttatacgaacaaataccttgatccatctcttcatcttagcgaggacaaagtcctgcgacccaacggggtcctggacgtgcgcggctccattggagagtcgtaccgatggtagacgtgagtcgagttggattgaagttggattggagttgagtgtaggaatgagagaagatggaggggcaggaggggtagaaataccacgcagaaatacgatgaatcatacgaagtacttcgctaaaggctggggccggaataatcgactgtgattgatcaagttcctaactctatactccgtacggagtattcacgccgggttaggatgcaataggatgcaagtgtcaagtggatagagtcggagttcatccctccggattacaacggatatcctcgcaacgtataacttccatgtgattcagtttaattaaagaacaatcataggcttcagatgcactgctaggaaaagatcatataaagcagagtgattaaacaagtacagatgacgtcacgagcagagtgtccactccaagggccaattgtgaggttgacagctaagcgacagggttccaacaccctcaactagtctgtccgatatccggcgtcggacccttcgcggccgttgaccgatatactgtccagtggggacgatgagcgttcggccatcttgcgggttcgcagtgtgagggggaagtgctcttcgggctcttcctcttcactatggaatgtattagtatttgacaacatcaatcatacaatggaacttacggcaatttccaggcaatataatcctcagtgctcaatccctcgtggccttcctgcagagaggcaaagtcaccgggagtcatcatcccggagcgatcccggggagatccaggaaccgaaagcgggcgggagagcttctgctccgttcctccaatgatatcgaagtagtcctcttggccctcgaaggaggagggataagctgtaaaaaaagaattaatcataatcaccgacaacataaaaacgaactgcaacatacctcttctcaatgccagctgacgagccttgacatattccaagcccattcttttccagtcgagcagatcgctcaggcgctccgtacggttacgctggttaatgcgctggcgacgactcttctccgtgaagttgaacataaactcggtcagctggttgaccgaatcgtcgacgcccttggagcgacggtcgacgatgtaaattccgtaatcggacgagttttcaatcaattcctccatatagcaaccgaatccagacagattggtggtgatgctaggcacacccatcacggtacattcggccggtgtgtatccccacggctcgtagtaggaggggaagacacccagatgggttccgcgaacgaagtcgtcgtaatcaagcggcaatacggggttggcagagttgaggaattcggggtggaaaataaccttcacccggtcggaggagtggttgaacagctgaacgcgacgcagctggttcaggattgggtcctcgtggtcattgaccatgttgtgggtgacgatagggggcagaccggtgcgcttcatgccgaacaggcgacggcggagcatcacacgatcttgactggtgatgagatctttctcgtcgggcatgttgtcgccctccttccaggaaaggcagcgctcatacatgcgcttgccgatccccttctcgatgttctcgacggtgtcgcgcagagacttgacgacggcctgtcccttgagcgcttccactgtcaacgaagaggtctgcgcgggcataataatgaacgcgacgacagtcatcgttgacccagcggccttcagtcgatgattgaggcgggccagcccctcaatgaacatatcgacacccttgttgcggtattcgtaacgaccggcagtgaagagatatagagtattatccaggtcgaagtcgttgtggccgtagaaatggccacgaacgaaatcgttgatcttctccttggcctgggagtgcaagttctggaactcgtgcatggcagagaatttcttgacattcagaccattaggcagcacaccatcgggtttgcgcttcagcaggtgctcactctcaaacgcagtgatgtgcgacacagtggtgaagacatcacaggcatgagtagcagcgcgctcaatgcagtagcggtggtagattcctcgcttcccggcctccgcatccacatcaaagtactgaaggttattatagaaatcaaccgagccagcacagaggtaacgacccaataatgtcgcgtgggtggtgaagacggttgtgaggtccatatgccgcttcttggtcagtggcagagcgacaccagccaaccattcatggaaatgggcaatgactgcccggcgacggtcatgagcaatgtactacagcgagagcatggtcagtcatgcacttttgccatctccaacgtagacaatattgctggtacgtacctctcccaagaaccaagcgaccaggtatccaaaaacgatggcctcgttggtctcattgtcaccagcgggagacgggatggccgaggtgttccaaagatcacccttccactcgtccagccacctatagccagtccccgtatcaatgaggagaactcggggagcaccctcgatgagccagcgaccgtagacgatgtcaatgccgcgctctttcatggactgaatcgtgtctcgcatggccgggttagacggcgagagctcttccacctccacagcagccgaagccctgttgagagggccgatcatggtgtaccgctcgccatactcagcggtggtcacaggcgctttggacttgagaaccgagtagatcccgcctactcggttcgccacctcagtagccacctcgaagagcatgtgattgcgcacatcacgcttgatgggttcaccattttcctccattgtgctcaaggccacagaaatcacagaaacacagaaaagcgaaagaaaaatgagacgcgagaatgggggagggttggacgcaacaaccttggaagagctcttcgactcggtctgtgcggggagaagtggaccttttgccttgggctcttctgggggaggctggggaggagtaggggggcaatgtcgatcggactgaagatgttgaagcgaaagggatatattttagagcagagacagcagcacacggagtacaacaattcccgttcctcgttccggtcaagggtttttctccggactggctgacgggtgtgaccacaggactttttgccgcgaagaagtctctgttagggaaatcccacccgagactgaggaaaagggcgtatgatgtgctcaggagattttatattaatctaatgtctatccatggatacaggtctctttgcttggtatgtaacagtcgtagcagtacccaagtggcatcgccatcgccccacgccgtgtactcgcctctctctccgttctatccccgatattcccctttctcctaggtttcgcccggtttttccgattattgggcacctgatctgcatttattcgccttcaatccccgtctccaaagctcagggccaatccaattgcagtttctcttcgggtctggggaaagctggagccatgatgtcatctcacattctactccactgaacggcgtcggagggacccgccggagcttgatcttctacaaatcgccgaccaagctggccacgaatggcttgagatggcttcaaccatctgcatttattggcggggaggacgcgcgggccatgttggaggggatgatcgtcttggcagttatccaattccctcattggcgttgagatatgcctataccgtatgacatggcagatgcaaactactttttttgtacaacactgtgttcctggtctctacctaggttgccccctgcctggtcggaggggaatatctccgagatcctgcaatgtttgacctacctcaaggatgcttccaccggggcagtaccagacaatcatgtccacgatgtttacggatagattctgcaaaagaaccccaggatgatgaagccgctttcttttaccctgctagctgcctacatgggtaggtagtacagcagttgactcatcatagtagagacacttgggaacaaagagcccatcgttgacagaatcatcaacaaagaacctcaaaagtcgcagacctctgtttgttcccatcctcattgtaactgagatggagtccagtcctcatacctgtagagaatgttgtgttacttgctcgaaaagcatcaactgaaaggcccattgatgtcgatctcggagataccagtataccagtccagagaaatataaaaagctgaacgagatgagacctgaagaaagacagcttctgcatcctcccgtccttcagcatctctctcttctgatcaacccgacttccgatcttcaatcatccgtctcattagacatgtctgagaagcaggcgcgcaagagggccaagatcaagcgttggttgagaagttgggtattcactccgctgggtaaggtgaggatcaagttgatcaacaagactgaacggaagcgctgtcgaagtatctcggaccgtgagctcaattggatcgttgatggatcttacgctgatcgatatccgtctcgcttttatcggggccgcaatggtcgtcagttatcgagcccagcgaggaagaggttcctgctcgagactgaggataacctatctctagtagagcttgtgtttcctatgtccacacggtcagggagttcacaacaccagccttctagacctggcttttgtgacagagtcgaacttgctgtgactaccgtccaatctgattatcttcatgacccccgtggaagctggcgagggggtgaacattctgcgctgggaagcatgaatccggacttggctgaattgagtagtgacggtgaaaggtctaagtcaggccccgtttgtgtatttgaggttggtagaaatgtgtacgagctttccgcagttaaggtaatgagcccaaacttacctgcagagttaagtggtggaaatcaatctgggcagtcaccttccctttatgccgagtctgacggtgagatggccaatttctctgtggttgaagagctgcctcctcagcttcccgatttgtatttcatccatcaacccaacccaccattatgctgtctcatcagttcagctcttcagaacttgctctcaccggtccctttggagaacggtatctgctcctgtgtaaaattctcacacagtattgagccatcgattcaacatttgtcctcggatatgtcacggtcatccatcaagagggccaagccccggatgaccaccgcagaagtcctcattcgctatgcaaagaaaagacgagatgccatcataaacaataggtacatctcaccatatgctcctttacaaccacgaccactccgaattcggaaagattataatgtcaccagcgaaccgcagcatgatgtcctgtccgccattcccgtggagacgtctcatgaggtgacagcaccagtgcatcgtccacgatacagtctccgccgtaagatttttcacggcgcattacctcctctacctccttcggcacctacctcccgtccattcagtggttcatccattccatcttcttcgtctgaaccagcaagacttagctctcaggcccttggcatctcatccactcctgcatcttcatctcgaccagcaaccaatggtcttccacagtaccctgaccggcgaacatcgatgtgcggtggctgcctagaaggacgacaccgtcctctccacagccatccatatcatcgccatggcgacaacaacccgcaatctggaagtcccccactgccatatccacttagcccgcgggaactcctaaaccgcctcccacctggaattgattatgttccaccttcgctcatggctggccccccccgccccgccccccccacnnnnnnnnnnnnnnnnnnnnnnnnnnnnnnnnnnnnnnnnnnnnnnnnnnnnnnnnnnnnnnnnnnnnnnnnnnnnnnnnnnnnnnnnnnnnnnnnnnnnnnnnnnnnnnnnnnnnnnnnnnnnnnnnnnnnnnnnnnnnnnnnnnnnnnnnnnnnnnnnnnnnnnnnnnnnnnnnnnnnnnnnnnnnnnnnnnnnnnnnnnnnnnnnnnnnnnnnnnnnnnnnnnnnnnnnnnnnnnnnnnnnnnnnnnnnnnnnnnnnnnnnnnnnnnnnnnnnnnnnnnnnnnnnnnnnnnnnnnnnnnnnnnnnnnnnnnnnnnnnnnnnnnnnnnnnnnnnnnnnnnnnnnnnnnnnnnnnnnnnnnnnnnnnnnnnnnnnnnnnnnnnnnnnnnnnnnnnnnnnnnnnnnnnnnnnnnnnnnnnnnnnnnnnnnnnnnnnnnnnnnnnnnnnnnnnnnnnnnnnnnnnnnnnnnnncccgccccgccaccccccgccgatctgggatcggttctcccccaggattggttggtcctcgggcgttgaatcgtgtctccgtctccctctcagacaccgcacctgactcgccttgggctggccctgtaggctccatggcgttctattatgactctgatgaggacttgcctttgcccgtcgagtctgatcacgccgagagtgttggtccatctggctttgaaatgtgtctaattgcgggatcggctgctcaaagtcgtagataccgttgagggacaagttggtgccgacattcagtgagggtcgatctggaatacccgcttcttcttattacgtttccctaagttggtctgtgtcaatctcttgtcagactcttaattatgttagaatcaatctttcgggcatcagaaccatcaaaaatcataaaaataaatgataattccataccaaatgtatcttttcacataatctttttggatgttgctggcagacaaggaaaaaggaacgtatacaacgtagccctagtatgaaaacggtcgcatatatattccacgcaatgaacaaaacttgaaagttagttacctcaccacaattctttaataatatcatttactaatggttctctcgatccatgaccttccattgaatttccagacccagttccaaggcagttgagctaagatcttggtaccccaactgccatgaagtcatactctccactatgagttcagaatgttgtcacggccgaacacatcgaaaaccaaatgactataagtataactatcaaatactcctctttcaattactacacaaccaaaaagaaaaaagaaaccattctacattaaactacatttcacatttccctcctctcctaccaaaatcaaccaaaatggtccgcggcgcagaatacgacaacggtgtcccccagagcgacaaccctatcgagaacggtcccaacaaggcccacggaatcggcagtgaggtgagatgcgcaccaagtaactccaattgaactctactaacattccacagcccgcagacctgagccgctcccacaaggctgcccctttgccagagcagactggctccggccgtgaagtccaccctggattgcctaccgctggatcggcgcatccccaaggtggtgctgcacagcctgtttcccttgatgagaagaacactgctggaaaataagtgcggtgattttataatatgcggatggcgatgaccctgtatgagtatgatattggtgtttttgatattttgcatacaacatacgtattggataatgcctggagattgagacctttccctttccgtatcattgctcacctcttgccgcttgttgatcaagtaaactgagcacgtgactgctttctccatagtcttgcaattgaatagttatcacaaccacaattacaaatcaaacatagtaattaaaaaaacgaatgtcacacccatttcaagcatcttggccagcgggcattcccgaggttcgcctgtatccgaccgatttggactcggaagagcttgcggatgaggccaaggggtggttgctgttcgtacggctataagactgtacccttcttcaatgataaggttggtatcgacgatttatcttactttctgtaggaagaatcccaacccacgtcaacctccgcagatgcgctgcatcaccggcgagccttaatcgagagatgggccactgccagccagggattccgcgaggtccgtatagttataccctaatgttaatgccttttctaatttactctcttttccccctcctccgttttcttaaagtacttgagaatgaatagaaaaaaatacgaaaatacaaacgagcagtacagtcctactatcaacgtgccccaggttatgactcggctcccgactaccctccgtccaacatacggagtacggagtagttagttgtcaattcctctgttggcaaccaggctggtccgttgatatatttttccgctccgagacgaagttgctggtacttgagagcactggacccccagtcgaatctgtcaccgatgtctatcatacatacgtattctacatcctacacggcccattgtatgtttcaaatgcgaaggaattgcctgtcgcttcactggcttcggccttcaattagtccgatatgtttcgcggtgctttttggcccttgtcttccttgcacagcactagaagccttcgtactgcgcgatattttcatcaggtcacaacatatttcgttacccatgatgcgagagggaatttagttaccaggaaggtgcctattattattggcaatccgggggaaacttatgttctgattgaaacagggattggcagtgcactccgtgccgctagccccttacatttccttccgcggctagtgctgaagatagatgcaaacttacattttttcatgattcacaacactttgggtttggtaagttgtcagcgagaggtttatatagccgatgctaacagtttattaggaacatcgagttattcccgtctctatatcccaagccaactccctcgtcaaacagaatcaaatgaaagccctgcaactttgctcttagacggagtgatgcacgagatagttctagatgggacttttgatggtacatataatccagctacaaatacttcccgtcttacgcatgctcatctataatgcctatccagcaacttttgcggagaacgcaagcgctactgcacggaacctgaaaagcgtacttgacaacctgaaggatatgtaatgttaagcttgattttactatagccatgtcgggaatctttcgatataagaccgttgagacggattggcaacctatgactagaatcccgagagtaaatgagaaatcccaatgtcatcgagactatcgggtcagtatcatcatagatccttgaaattcacaactggatgtaatattttctaaatttgtctgcaaatatgcacaagtcaatccatgcacaacattatgattcagttatcaatgtccccatcaaggcaagcgtggcggacacaacgcggtcttgactagacaatgtacagtagataaagtgatacgaataatcactaaatcaacaacaaaggtttacatcatgatacacctctttccctcccctctagagcaagaaccaaaagaaaggctaagacggaggattaacgtgcaaaacaatatcaatttgtgactataaatcccacttgaagctcgcaaacaataggactggatactgtgagccgcctagacaccattcaaaacatcgatgatgtcgacggagagtaagaggctagtactcagtagctgagcttctatactccatgatgtctgcaatcaccggaccaagaggcgatgccacagacttgtaataagttcctaactgttcagcggtccactgattggtaacgacgcgatgtgagcattttctagccccttgttgtgtaggtcctccgcgaatggtaccttttgaaagtagtagcttggaagactgtcaagaatcgaagcgtttgtgtagccattccgaaagaaagcaggcgagagggaaatgagttgtatgttcaaatggagttgtgatttccaataagcaacctcactgataaacccttaaagacatcagcagaaaatacggtttgtaggagagatagtaatcgacttcaatgaaagagaagacgcaaatatttatagtcctctcagatgctacctatccaaggctgttgggttacaggaagactcgtcctggtgttctccgggagtattggattagaacgccgtatttcagcaagagagttaaacttacctaggtatgcgtaagcataatgtccacttcatcaagggcaggtgatacaattttgatgagatggggcaaatattagaatttcatgctaagtgaccttagatccatctcttgttttctcatgaacataccgaaagggcgccaccaaaatttcaaggcgcacgatactgtaggccgatgagaaaaagcctagacctactgcatccgctaaactaggaaataagctgcccaggtccaaggactgtatctgactctaagctacgtcgcaattttgagacacattgatctgtgtctggtcttagtttggaacatctatccttgacccacctctaagggaatctaagcatacaaactcaaagacccacaactcagacctcctatcgactccactttacgatatagaacactaaaatgcggggattcgcctagatcttatactatgtatatcgatactatcgataaagacctaaaagaaagcttaacaaaatattctattcctcgttagaatggatctcctagtagccctaaagattatcgttgcgagtcagcctagtgagtgcggttccagggctttgtcctgtaatgaaattgttaggactagctactagcaaaacgtccgtttgcttgcttccaagagcttatcttctgtttactatgtacggtcgccttagaagtcactttaaaagagaatgtgtttcaagctatgcagtcggttttccactgtgatgccaactcaaagtctctcagaggacggattcgtggtgcaaaatgggcaaaccgggccatttatcttttatcacgcactaactggggttctcgtagctgggacatcatctatattggtatgaaacatatttcaagttttcttggataagctaacttctggtatcggcagctagtaatcaagtcaacttttataacgagttcaacgactattcgatccttacattttttacaataaataggtatagaactagaaatattgtcgttgggatatgtctctttgattgtcacgctcattttagtgaggagatcgatatggagtgtaacttcaacttgactaaaccatcgcttactacacctgataaatctagagaacccctaaaatggctgtgttaggatattagagatcacccatccccgtgatctacttcctagtaaggcttacatagatagatgcttcgcttctcatatagaacttggagaaggacgagggctatcccagtagtcaattaggaacattccaatgcttcctgaatcagatatggcgttcctatacaattatcaagcatatcatcctctaagtacgagttgtagattaataacccagcctcgccattaggcaccttatttgaccagaccaaccccctaagggaatattttgtggaggcttgtactcgacagttgcgagaatggtgctggttctatcactaacgcgatggattgccacgagggatggctcacaattgcttttatattggagattttgaggtcaagtcactctctatgagacacgacaaagagcctctgaccgcaacataacaaaaaagatgaagctctccttttccctacgcccgatgaacatgacgtattagcttgatgaaatggggggggggggggggttagaaaaggggggggcggnnnnnnnnnnnnnnnnnnnnnnnnnnnnnnnnnnnnnnnnnnnnnnnnnnnnnnnnnnnnnnnnnnnnnnnnnnnnnnnnnnnnnnnnnnnnnnnnnnnnnnnnnnnnnnnngtgtgggggggggggggggggggggggggggggttagaaaatgagggcgcgatgcttgaggccggtctgagtaatcagagagcgtccaatgagcatctacatagaatcagtgttcatacacgtgactggtctgagctcatctcattaaagcggcagcccagataggaaagccccacacataccgccgtgaatcaatgatgttattcggaggatcaacgacaatatgcgcattctataaatgcgcaggaagtggtggttaaaccctttgattaaagctaagccttaggaagtgataaaaggtaaaatataatccaccttgcctagaggcacgccttccttgcgcaagatgccataggcagtagttacatgaaagaagatattagcctgcataatgcacgcgaatgcaatcccagacaagagttgtgtattacctcccagaggcgtggggctgacggtctcgcaatgttcgaggatgaagtctttgtcaaccgtgtcgagggcctggtgcgccttgtcgatgcgagcgtacatttccgcaaatgtgtagaccacgtcctgactcgtgtcatccgttgggaatggttcggctgtcagcttagccagagcgagccgtgtttgcatggttgctgcgaacacttggtagctaagtgatttcatgtcattgtggagtcgacaggacggaagattggaagcgttgggcgcctcctcggctttgtgaagaatatgcgaaagtgcagttaaagctcgcttggtctggagaacaaagccctcgtaaattgtgtacaccattttggctatcggacttgggggagtgaatatgaagtttgtgtgtagaaatatttttcatctgagacctggggaggcaggttggttatgtagcgtacgatcgtccccaagaacgtgagatgcgcagtgccttgggtagcactaactagttagttatgtgatacgtaccacgtaagcactagtgcgtgtagcattgatctaggttcacggggggcctcgattgagtccagtgatcgagatcgggtgccgtctctacgccaggcaaggatgaaacatgaaaaggatctatataggaaccgaaaatgatactgatttcctggaggtctgtatccggttggttgcccttgaatcttgagtagtgaatgtgaatactcttttgccgaagtactgagagcccgtaggtccgtgcatgtcataataccctcgtatccaaggtctcagataagaaattatttcatagccctcggacgagaccgcatgaatgtgttatcctccttctctccttatccgcaaggagagtgaagtaaggcacacgtctaatgcgtaatactacatatactagaatgagaatcacggctcttattcatatccacaaacgctgggatagctctataaatgtggtggacagatatgtggtagcagcaaatgacaagtgtacggctcggtaatgcgtgcgcagggaataacggaacatgcagaaaaaaaattatatgtttaagagtaaatatggaatgagaatggaaattaggacttcgtagaatcagagcgatcgtcccgatcttggaacttctcactcgccttctcggacttattggcttcgttggtaatggtaatggtcttggctcgcacaacctcgaggagcttgtcgccaacctcgctggcgccctcgattttgctcagtttggttcggaaatgctcgacatcggcttgcattctgtgtgttgttagtatcaaccatgagccgaattcgagtactgaaactaacctcttttttcctgcctccgtatgcacgtcggcctcctggaaggccttcgtccattgatcacggtagctgttgaatacgggcaccatgatcatgctaactgtcatgtctggaagatgcttgctcaagacacggtgtagagtgcccgtctccttggccaatgtttccatgtaaggattgacagcaggagctgctcccttggaattccagtcgatcttcttcatcgcgttcacgtggaccgaagaccgagagctcataatatccaccagcttctcgtggatgccgctctgatgctcctggcatagtcgtttgactttgtcaaactcggccattaatggatttgtctgtccatgccgacggacaaattcccgtacatacgggactaaagcaataacaaagctcaacgcttgtgacgacaacgcgagatgcttagttgtgatgttcttcaggcctgcactacgcgtagcgccggccccaagaatcaactgcgatgaccgcgagttgaacagtttcaagatatctagtagatgcggcgcaatatcctggatcatgctaggaatatttgacatgaggaactcgaactcctcaatgctacgcatcatggcaacagcggagtcaggtagaatgtatttttgctcgtcgatgacggcactgcgaaccttggacttgtctgtcccattttcagcggcagtaccagcaattttgccttgctcatttgtaggatggggaatccagattttggagacctcaacccaggcctcgatgtctttggtgctggcatcgaggatcctagtaagaatgacgttttcggcatctccaaaatcgcgtgcatcccatcgatcggcatccatgacattgacaatttgatggcgctgaccatcaccgaaacgggtaatgaaatcgcggatttgatttccgacaatggtctttagagcagtaccactgcgtcccgagatggcctcacattcatcggcgaacaagcggttgagagtgaagtacctgaggaattgctccttggaaagctgggcggtctgttcagatcgtaccttcaatacctttattatctgagattgggcgatgtcaacggcctgaccaagcagactagacatatccaaaacctgtagaatctcatcctgggccatgtccgaggctgtcggccccatgtgtggtgattttatagcttgatcgatactttgcgggatggggcttcgtggtggtgacttgacgccggaagtgggcgaattccccaagccgctagcgatatctagaaggactttgacttggacgctgagtcgcctaagcgattcgctaatcccggtgtagatattaatcaacattgtataagcatcatccgagtcgagagcacgcagattacgagcaagaattgatgatttctcctgctggcttagctgatgaccgccatgtgttgatagcgataccatagattcattatcatcatcactagaactgggcaggtgtttgcgaatgaggcccttcatttctcgtaaaacagcagttttgaaagaagttgctgctggcatcgtatagcgggcacgtgcgagtccgttgagctgggtgttcaattgtgatcgcaactcgctattgaaatccatataggcaggcgataccgatactccagaccgttgaccacctcgctgccgttgaaatgagtttccccagcgctgcaatgtcacattcgatggcactgtttgaacatgctgtcgtaaatctcccaaaaggtcattcaagaaccgggtctcatagcccatgccaatacgttgacggagctgtgccaggtcgtcagatgctccctcaagggccttgatacctcgcagatcaagaaggcgcctgggggcaccctccttgtcttctaaagtggcgcgatcggagagcttttcaccggccatcagcttttcgacttcctcgagtccctcggcagcttcctcaatgtcaccctgctctaccaatccttcgcaccgggagacagattcaaccacgtcccgaagctgagccacagcagctgccaacattcgtacattttctcttcgccgtctcaaattgacaattttgagaccgccaagagccatttctttatcgattttctgaaggtctcttctgagtacttggatccggttgaccgagtcggcggcttccgcgtgcaattctcggagagatcctagggcagtgaagaaggatttcgaggccgttgagatagacgaaataagatggatctccacggtatccatataccatgaaagcttttcttgtagaatagcattcgttgccagtgcttttcttccggtttgtactggctccgcaaccaatccattggcctgttcatcgtctttggtgggcggtctcggcggccgaaccacatctgatttctctgatatcacatcgaacgtacggggattttccagatggaagtcctcttcgaaataaacgggaggtatagtggagagaggagttaccgcgggggcacgtccacggccagtggaggggcgtcggccgcgagtatcataaggcgaagatgatcttgaagtagtcgagatgactgaagacctccgctcgagagaccatggcattaatgaatcgcgatcagaatctggcctgggagatttagcagcctgcgccggtagtgtatcctctcccgcgccttctttcggtcgttgaaatacatcgtacaaagtgcccacttgcgatagatatggctggaagacctttggatccacgtgcttaatgttggtcaaagtcacaggcgggatatcacgagaggatggaggcctgaagctggcggaggatgtggcgctactggtcgtcagaccggtgcggatgatcgggggctggaggagtgttgaaatggctacatgggcgttaacacgtcaatcatcgagcaattgaggattcccaaggtcacaaaccattctgcccagactctgcgacagactctgagattgagccatggtagtgagaagagtctaggacacctcctatgctcacgatcgagctcgcggttgatcccctcctcagggggaatcgctgaggagccacacgtggtgatccaagctgacttgttgaataagaaatcgaaggcgacgagaccccagaagccaagctatcaattgattttcgtggactggttgacgacatggctgtcacagccggatcggacagccgatcgttgagatgttctgtgttatctgatcatgacagtggataaactcctgactatagagcgctggcaggctcaggtacagggttcaatattgatcgagtcagcttctgcgattcgcaattttggtgcaagatcacttgggtcctgtgtgcagaatgactgatgtggctttgtttccatcaagctggtaatctccccaatcggccaatgcgctaacgccgggcccgcggttccccgtgctgactcagacagcacctgcctcaggcaccagctgactcagaaaccacttaacgcgtgaaccctcgacgcgtcgcgttggttccacactaaccaaaagttcttgaagcctcccttccgccaaatcatcaacccccaacttgcaatatttgcggtcctctacactatggatagacgcaccccctatactttgagcgtccttgcgcccagcacaaatggtgctgatgaagatcgcaccactattcaaaaccgccttcgggatttcgtgctagaatttcaactggataatgcattcgtctaccggtacgcatcccacttccttgagattccaatgtaggctaatttattattcaacagtgaccaattacggcaaaatgcacttgtgaaacaattttactgtgatattgatattgcccatctgatttcctacaacgaagaattggcccacaaactcaccaccgagcccggcgatatcattcctcttgtaagtttcttatcccgccaatcttggccctcgctgactcgaagtagttcgagctggctctgaagcaatgtactgcacggattgtctaccctgggcagcgagatatcatactaccctcccaccaactgctcttacactcctcggcatcgcacatctcaatccgtgatctcaatgccaccaacatctcccacctcgttcgcatccccggaatcgtcattggagcttcaacaatatcttccaaatcaacaatcattcacgttcgttgcaaaggctgcgactacagcgagaacatccaggtcgatggtggcttctctggcctcacgctgccgcgccgctgcggtcgacccagggacgacaacgatcaacccaacgagcaatgtcccttggacccttacgtcgttcaacacgaaaaatgtcaattcgtggaccagcaagtcctcaagcttcaagaagcccccgaccaggtgccagtgggtgagatgccgcgacacgttcttatttcggccgatcgctaccttgccaaccgagtggttcctggctcccgttgcacagtaatgggtatcttctctatctaccaagcgaagggtgttaagaaggaggctgcagtggcgatccgcaacccctatctccgcgcagtgggaattacctcggacttcgaccagacagcaaagggaaactcagtcttctctgaagaagaagaacaagaatttttggaactcagccggagacctgacttgtacgatgcacttgctcgaagcattgccccgtctatctatggaaacgtggatatgaagaaggccatcgtgtgtctgctcatgggtggctcaaagaagattcttcctgatggaatgaagcttcgcggtgatattaacgtgcttatgctgggtgatccaggtactgccaagtctcagcttttgaagttcgttgaaaaggctgctcctatcgccatctatacctctggaaaaggttcatctgccgccggtttgacagcctccgtgcagcgagatcataacactcgcgagttttaccttgaaggtggtgctatggtgcttgctgatggtggtgttgtgtgtattgatgagtttgataagatgcgtgacgaagaccgagtcgccattcacgaagctatggaacaacagaccatctctatcgccaaggccggaattaccacaatccttaactcgagaacgtccgtactagccgctgctaaccctgtcttcggtcgatatgatgatctcaaaacccctggcgagaacatcgatttccaaaccacaatcttgtcccgtttcgatatgattttcatcgtccgtgacgaacacgagcgtggccgggacgagaagattgctcgccacgtcatgggtgtgcacatgggtggtcgtggtctagaggagcaggtggaagccgaggttcccgtcgagcagatgaagcgctacatcagctactgtcgcaggcaagttgacactcattactgattccaactgctatattcatactaacatcctgtccagtcgttgtgcgccccgtctctccccggaagcagctgaaaagctctcgtcacacttcgtctctatccgaaagcaagtccaccgcgctgagattgaatccaacactcgatcatcgatcccaatcaccatccgtcaacttgaggccattgtgcgtatttccgagtccctggccaaactttctctctctcctatcgccacggaagcccacgtggacgaggctatccgtctgttcctggcatccactatggacgccattacccagggtgagggccaaggtagcaaggaactcatggagcagagcagcaagattgaagacgagctgaagcgtcgcctccccattggttggagcacaagcttggctaccttgcgccgtgactttgttgatggcaagaactataccgaacaggcacttaatcgtgcactggtggtcttgcagcgacgtgacaccatccagatccgttctggtggatctcaaatctaccgtaacggagtttaatctgtgacttattatgattctaatgtgttctgttgatacacctgatatgtgttatgggatgggttgtcgattctgcgcatctgtcgatcttgtaaggcatgggagcttgccagtggtgttgggcgtgttttatattgggatttgacgggattctcaagaacaattgcatatttatttctaattcttccaagaatactgtataaaacgtggtatcttccctatcgtgtgtcttagcttcccttttagacaaaacccgtcactaacgccagttccctcatcgccttgaaccactgggaacgaatgaacatcgtatgaagcattgttcacgatatatgcacaggaccaaggagagtacttttgtgattattatcatgtcacttggcatcggtacggtttcccctttcaatcaccaacaacaattcattgaattcaaaaaatcactacacatatctgcagttttccccaattatctcttcatccagtctttctaaatgagtgcatgtaagccctacgacgattatgcctgggcaataagctcccagatctggggcgactggccaaaacttcttcgcactgatgggaacttctacaatgacattggagccattctttgtgaagaatttagcgatcttaaatgtgccctgttcgatttcctcaacacaggcggtttcagtacctgcttcaagatggattcaccaatgattccggcgctatcatgtttcctgaagaaaaagtccggaatgaagtctccatcatgcaatttctctcagaaaaaacttcagacaaaatcccaatcccggtgccttctatctttcgctggacaaagacaaaagagagtcccttaaaactgggtccttttatcatcatgaactatatcccccacgagggaagtatgggtgatcttcttgagacgccaggacgccaaccaggacaacgtccagtacttaatccggagctcaatccgatgagactataagcgctatatggaaaactagccaacatcattctctcgctgtctacactttcttttggccggataggatccctttacaagaatgccgattctacgtgggaagtgttacatcggcctctgtcttactctatgaacgaaattgtgcaattggggacgttaccccgatcgaagctaccgatcaccacgtacgataaggcgtcatcgtactttgaagccctcgctgagctccatatttcacacctcagaagccaaaggaacgaagcggatatcgaagaggacgtcacgacggatgtcttggcggatgaatttcggcgcaaattcgtggctaggtttctcttccgcaaaattgctcgagatcaggagcagaaaaagcaatggatattacatgatgatggcccatttcctgtttggtatgacgactttcgaccagaaaatgttctagttgatgaagcggaaagcatcgtcggagtggtggattgggagtttacatataccgccccagccgaatttactcatgcgccaccctggtggcttcttctcaaaaagccagaagattggcttgaaggccttgatgagtggtccatggaatatgagaaaccgcttcagatctttcttgaggcaatgcggaaagccgaagacgaggcaatccaaaacaaatgactactagaaggccagcggctatctagtcggatgcgtgacaattggcagagcggagacttttggatcatgtacgccgcaaggaataattttgctttggacacgatatattggcaaaagatcgatcagcgattcttcggaagcacatgtgaatacgagaatatctgcgatgtatggcggaagagactccatctcttagaaccagaagagatagagctcatggaagaatatgtggatctgaaggtcaaagagagggacataattttcgcttgggacccggatgagtacaccgtggaatggatcaagaggatgagggcgatgagaaagacgaaggatatgaagcagaagatggagagagtggtgaaggagtgggaggaggagctagatagaatgacaaagatggagagcaagggggagataaagaggatggagatggggtggaaggaggtgataaaagacatgaaggagatgaagaggaggacggccgcggagtgggaggaggagatagagaggatgatgaagatggagaagaaggaggaaatcgaatagcttctttagacctgtcggaaacctccttcacatcctcttcttcttcttccatgtagtgaatttagttcccttaaaaatcatattttcttccaggtgaatgcaggaaagagattagaataatgctatggtgaagcgaggtgatttatgtccggactgcattcattccaaagttactatccgatctagacgtgctgcttgtctgtattcgagagggaccgaggtcttagtaggatatcatatagggtagatggacatacacataccaatagcgtaggaacagtcctaaatagttgccagctatttgagccttaatgccatctgtgtgataactccgccttctcgtcccgtcaacatatcgattccatttcttgactagaccgcgctagcctagaacctggccactcttcatagggtaagaatcgaaatcaaatggagcgagctccatcggcccttcgagagctatgcaatctgatctgatgaagcggatacaatgaatggacgtggtgtagccacgtcggtaagtctgtttcggcactcgaactacaaccagtgggacaaatgctaattcaatccacaatatggagtatgtttcacactgatattgcctacaaacctgatgaatacttatatagaagctcattcatacccgagacatatatatccaactcgaaggatctcaacggacttggagagtcatcaactcatttggaccgctgcagctacttcaaacatcaatgccattaccactgctgatttggtacaatgtcttatcgaacggaagtttgagctgtttgacatcgacggtagcccagccgaacggcttggctattggatctcgatcagggccggaaccaaaacctcgagggcctggttgctaatcgcttcacccacaacatacctataataccttacctcctctttttgaccaacctcatcgacaccaagaataacttctgcgtcaagccaggttactctggatgcgatttgccgaactgtccaacatgccgcgcacgtgatgttggaatgactaatattcggtaaaaggggttttaaccaaatgttaggcatttcagcagccgatttacccctcaactagcgagtgtattccgtatgtacggaatagcacggtgaacctctattttttggcttttctctcccggaataggagacaaaaatttgggatgatgcgttgtcaatcttgacatgatccacctcagcccctccaaaccctccaaaccctcccaagtcacagggctagccttatccagccacaggtcccctatacgccacttgtgaataaccccttcgcaatgtcgactgccaagaactgacaacatgaggctgcatccccaaattgacttggctctgttcagctccacattgtccctattaggcaccagcgtttctcctcggtctattcgaccttcattggccatgtgtggcccacgtactgtggctgtcattaaggctgtcacgggatcttgcatccttggcgcgcatgcacagtgcaacatcaggacatgtcgctcgatcctgtggctggggaccgtcggaggtgtcgccatgcgccacgataactgcacatcaagctgatttgctctgtcctcttttgaaccggagaccccgccaagatgacagcttggaatgtttacagtgctgatccacccactgacgtggacgggcggtgtagatggtcccgttctgtcctatccacagctgtccaccctggaaacactaactcgctaggtttctttgtcctaaaaagcctccccgcttactccgtatacggagtacaatctccccgctttgccaatgccggtcgtcccaatgaatgctccactcgggccagctgccatggcgcaattgaggcagtgcgacgaatgagtccaggacaagtgtcggacaggaactgggggctgctgcatgattccttgtgtaagcccgtatcgcaattcggggtgtattgacctcgccgtatggggtatataaggacagtccccttccctgaccacttctgccatccagaagtttatgatacatagtctcttacactctactctacattattctctcccaaatcgacactatgagcttccacgaatctgcttcccacatcgagcttgtggatggccacatcctcagggctcttcttcgcactgagaatggtgatgaggaggagtccactatcgatctcgatcaccacattggaaacgacaatggtatgttgctctgtctttgtcttgcagtgcccctctacacgaccatagcaccagttagtctgactcgtttatttaggacacttccactgggatggcggtgacttccacgccagtgccgaaaatgtcagattcgaccgcgaaggagaatatggcgtccctgtcctccgggctgtattgcgcgacgtcgatggcgagggacacgatgcggatatcaacctgtccgagcgcattgggaatgataatggacgcttggtcttcaactagtgggcttagacagctctgagctctagggactagcctcatcattattgctattgtctggtacaattagatacaatatacatggcagatctctaataacttcctactgttgttgctggtatcacgatttacgttaaatttttgctttactccattatgtctcttcgcatacaatctgtcatatatatcaacgatttagtctaatactctggttcatttacttatgtggttagttggagccgataaatgtcttttgagtcgtttcggatgacttttacatggtttgtccaatatccataaaaaggaaattgttatgtttctaagtttctttctttatttcagatattttcctccatatcgcaattcactcgctccttcccttttgcccaccttccttcactgcctcatatgctcatcttcctctcccattatgtgtctgatgaaaatgccattttcaacgtttgtcccctgcttgatgattgacttgcgattctgactttagctcctgactcttctttatcgcaccatcgtccataacccatcgagtgaggcaaatattccctaaattatcgaagcctcgtcttgcctcccctggaatcgtaacgctatctcgccctcctcaatccagccagcccatccatatacaaggtcaacagacagaggaccagctctgttatttggaaggcgaagatatagacattactaggatttccgaaccaagccgacatcacccctcaatatggctgtgaagccaaaaggctaggactataccccagtcggcctgccatgtccgcagtcatataggtaagtacctgatggtataattgttatggtgtagtagcaagttaacccattaaaaggctcagcgaggatggctgtactgtctatgggcttccggaagacgcttgaaatcctttaagttcccaaatgtcacccacaaccacataaccgtgtccagatgggcttattgaacctcgctctaacattttggtctctacacagaagctgctcagaccgagatgaagagaaaagacttggcggccaagttcaagcacagcaataagataaaccttgtcgactacagttggcaatattattattattgttgagacaggcgtgtcagatccgctaagttaactacggcaagatgcagaaaagtgatttgcagactattgctgccatgctaggattgccataatattgattatgaagggcctacgtacacgaaggacctagcagttatggacgctagtgctggcatgaaagtcatcggagaggcagatacgccgtggtcccaggatgggatcacttccagaggcaaacaatgggagtgatgctttttggggctgaacatgagggcagaattggctggatcctgggtgttggccaggttattcgcgttgggaaattgcaatgaagtctatccattctaaataccaagaaccaacccggtgccgtgcacgaaattgtactccacaataagagtatccccggaaatatacgaaaaagtcttggctagtgacgttcatcggtgcgtaaggccgttgcatgtaaaatgccgagctagctcggatgtgggtggactacctccaccatacaatgctcaccaccgagtcaatagaaatacggctttcgaataaatgttgaaataattcgttgaaatctaaccgtaatttgacaattggaatgctgaatccaatcactggaaagcggaagaggctgtttcccgtgatgcagacaaatgggaaaccactcgctaacgtataagcattgccatctgccaataagagatagtgaatgaaggagattcataaactcggagagaaaatggggtctctctgctagccatatagggcgttgttatggagttgagaattaaggtttaactgtaatcaaataaagctattgcaagggtaagtgtcaaaataaggtccataaagtatgtcggtagagtgcagatccacgtgcgtcccgcatttgtgggtccacggtacggaagtaaaccttcgaagggaccgcttgaaataccgtcttaattacatcatatctttcatccttcatcttttatccttcatccatcatccgttgcaaaataaatatctattgtatgtttcccctcccttcatcactttcgacctaggcacttaatacggaggacattgggtttttcgacgacttctctggcactgtggtcacctttcagacgaatcaaaacaccccttggacccaaacatgggtcatcgaagaacaactatcagagcgttttcaccgtgttgacgaagtggatgtggcccgcaaactcgggccatcgtgagctacgatagagttcgaatgctaccgcgagaatgacctcaagaaaggcgtaatgcgtatctaccttcaagtcccaaacttgaaaacggacttccgaacccctcatcgccgcgcagaacaggcgattgcatcaccaacgcatttagagattgagtcactcaaaaaacttcagcttatgggctctaccgtagcaccgaaactcctcgccgtgcaccaagataaacaaagtgacaccggttctgtgccaggggggtatatcaattaccttgtgtaggagaaggttcccggggagagcttcgacatcaactggttctgggggctctcagataagtcgcgtgctgatattcgtttgaagttcaaggcgctctatcggtaaatatccatacttccacactgatgaaacatttagctaacccatgacggaagtgaggttctagcgtttggcattcaaattttccccccagtgccatcgaaaatcatctatgactttgagactggtaccatgtatttttaccttttcatatttgtctatgttatatgatttatacttagcaacacattctaacctgattctatttaggcaccttcggggtcttgtaatggccacagagaagggagatccgctgcaatgggatgacatattatatgactagtttcatctgttaaatgctcccaatctgaaaagttaccagggaggtcctgactgggtttggtagaggaggatgtttcattgccgtgactactgagccatcaatctaagtgatgtgatcataaacaaagaaaacatatttctattgacttcttttctgccgactagtagtagtaatacgatttcctatatagtcacaacccagtcatcatcagggtgttgttgataggttcgtcaggtcctgactcagacgcacgacatgccatgtgaaaaaagcattgtttgacactaataatggtgcctgggttgaattctgtcttggcctccttgatttgcgaatattcagccatccatacaccatcgaccagttgttgacgcaaaaagattgtctgccagtaattggtcatgaagccgtagttgcaactgaggtcgtgcatgtgcatcaaaggttgtgccagtaaatacctgaggcggttgccggtggcgtcggagaggtagggcctgaagtcatgagtaggtacccatgatacctttagctcccccaccatcctcacagttgtttgattgtccaaggaaatgacatcaggggtatgcctgtacataattccagcacattgaaaatcagcgaaagtcatttcaatgccttgagcctgaagcactgctccaacggcatgtccaactgattggaaaaaccggcctcgaactccatcttcatttcctgtgagtacaatttctgggactggatctgtgatgcccttccgggtgtaggccacagaactccattgttgagtggaatatgtggccacaacatccgtttcgaagttatcccgttcctgtatgctaccaacaaacctgaggctgtggatggtgtttgttatgcttgcaaatgggctttgtgaagcggcgggagaggtctgagaaggaggtgtctggcctcaactttacgagccatattcagcaaacctgtaataatcagctgcaatcagttgaatcagggtggggattagactcacagtctagtgttccgtggatagcaaagcccaccgagtgtgatgcagctgaggtacaagggtgccttataacaaagcttgatgaggcggtaataggagagcacagaaagtaaaatggtaccagaggtccctagtgataaagtagatgtggagtgtgtcccgaatatcgcggctgatgatcaggcttatttcgaaccatgaatgtgtgatgactttcgctgattttcaatgtgctggaattatgtattgtaccagttacttattgcccgtagagaattattaagacgtacacgtcgaaacttggccttctgccaggccaggctcagggaaggtattcaattattgaaaggaccatggccttatccggctatagtgcctagggcttcgacataatagggtggaaactggcaagcgggcgggttagaggaatcccatctcctgttccgttagcgtgggatctagagattcatgatgaggaacactatttggtaggttcagccgtagcctgagtgggaggttccataagagcttcagtagcggctcgtaccaggtctggaagtattctcggcagctccaatgtcaggctggtcaggaagttcgatgacaagctcattgggagattcaaagagtgctcatacccaaacggggactccaagatatatcatgttacttgacaaccatctcaattttatttcaataagcgtagtaaatttgatgaaagtgggagtaaataaagaccatatagctttagccaggtatctgttaagtttaaccaaaaggtaagattttccaatgaagaccccttataggttagtggttaattcgttggaattagctgctacgagctatggttgatcatgtcgtgattgggaggtcagttggatgggttaaatgccttggttcgatcctaggagtagtgaacttgtctaggggtgattcattttttttcgctccttacatctatcttataatattccaccagtaagcgttgaaattttgattactaccactctcaagacagctcttcaaaaagtctcctatattagtcgaatgccctgatgctatgatagattgctgtcatatgctatagattgtttgctagatagctaagcgggaagggttgaggtttgcaccgtttgcgaagggtcagctatatcaaccggctgcttctcacttcccacttgcatcttctttctttcctcatcttcgttattgagttaatgtactctttttgctttatgatcgatctggcgcctcacagtaagtacatatctgaatgacccctttggggcggacactgaaggctaaccaataagtggcagcagtcaatcaaagccccgtccgaaattgatacaccctcgacgagaatttccagagttccaacaaaatacaacgacggttgaaaatttaaatacattgattcgccggtaacaacaaagttggttagatccagcgtggaactagccagtgaagttcatgggattcatctaccgagatccaatgaatatggcatgtagcatctacagatttccagtgcccgcaaatgcttgcaaattagttggaattggtggctcgatgcgaacaaagtctggggcagcgactgtagtatgcaagagaataaaaaatatttcaagcaccaccacacaatgggttaaacaaggaacttcttacccagatcgtggaacgatcaaacttttcgctgtttcctatgacttacagacagcttgtgaggcgatcgacaaggaacatcccaatgttccaggaaatggccctatggatgatgctcgttcggcgaccatgccagtgccactcaatatacagtgtctcaccgcaggtaccatagtccaatttgattacatctctacgtccataccaatactgcatcttttccaggatgaccctggcaatgtcgccaccgacctcggacgtggaagagtcaatcaccggccgatagagtggctaaaaggccatgtatgagctttgcatgagaacgaagacctcatggccaatcatagaatatgtgacgggcatgcctacacagcccgctccatacattcctggtcgagctcttttttcccacctggcccatctatgctcccagtcataaacgaaatcgccatccaacaggctatgagcgaatgtcacgcaaggcctccaaagtactagttcccagccacacacaatgacgaaggaggtgttcgtcttttctgataacgctgatgtgcttaatcgcactagaggcgatcttgcatatgaactggagagcgatgtggcaatcaattggagataattgctcggcactcggagaaattgcataggctgggtgtttctatcgagctgcacttgagcccaggcaattccggtatgccaggcaatgaagtcgccaataaaatggcaaaaaaagccatgtacgagctttgcatgagaacggagacctcttggccaaccatagaatctgcgacgggtatgcctacgcaacctgtcccgtttattcctcgtcaagtccctctctcttcttcgctttttacccgcaatacaagtaataagccatcaccaattatttggaactgggcaattaatatgttgaatagtaggagacaatcctccatttagatttgtatgttgtcaagatagacgtgggtatacatcgtagatcggatccacgggactgtgcctgtcggccccacatattccacatccgatgtgccccgctcggacgtcactccaattctttttccactccaagccttgtctctctcaattacctgaccgaaaacttctcaattgtcgctcctctcctgcgttgcgcatctgaaattctgacatctacaaggtttccatcaccctcagttactcccgtccaccgcttttcgcatcttcccagcgcaacccaaagacacaaccagcctccgacatacaatccaagaaccccttctccgccatggcacccctgatccgagtcattggatcactcaatgtggatatggtctcagtcacaccccggttcccaaacccaggcgagacaatcacttcctcatcctacttcaccagcgcgggcggcaagggtgcaaaccaagcagtggcatgcgggcgtatgtcccgatctaagccaacaggcaccgccaactccaccagcgatgtcaaagttgaaatgattggcgcagtcggcgcgctagatgcccacttctccgctctgctcaagccgaccctcgagagatccggagtcgacccgtcccgagtgaaagtcatcgagaacgcatacacgggtgtggcggtgatcattgtggactcgtcagctggcggggagaaccgcattctcttctcgcctggtgcaaattacgatggcatgcagcctaccccggaagtgctgggtatggcgctagcggcgcccgtacccgatgttatcgttatgcagggcgagatcccggtcgaaacggttattgggatactacgcgagatcgcagcttacaaggccaaggctcgcgctgctgggaaacgcggcattgagtccggtccggatgttatgcttaacccggcacctgcgccgcctggtggcttgcctgaggatgtatatgctgctgtcgaccatttgatcctgaacgagacggaggctgagctgatgactccccctgcggaacaactgcttcgcacggttccggacgcagagggcttggatggcaaggagaaggtcgctcgatatttccacaaattgggtgtcacttacatacttatcacgttcggcgagaagggcctttggtacagttcggccgatgccggctcctctggacctagtgatggagtgaaacgcttcactaatgatattccagccgcctctgtctctcatgtcttgaatactactggagcgggtgatacatttgttggggcctacgcggtcagggtggcgcggtggcgtgagcagcgtcgcgcggatggcaaggctgggcaggatcttgccgatgacgagaaggcataccggtataagactgtcatggacgaagcgatgcatgtggctgcgcgcgcctcggctcgggctgtggaacgtcagggtgccatggatagtattccttttgagaacgaggtctaagctaattggtacgggaagtctgtggtaatgtgcatcaatatatcacgagagactacagactatgtatatagactattccggtcggcatttactgcctgtagtagaatgccgacgccatcgtacgtcgatcgaacaaaggataggctcttggttttcgcgagtaatgcaacaaggatcagtacgccgaggaaataatccgagcccatgagggacagggggcgcatgtgccatcagaccttgcgaaccctgtccctgtccatgtaatatccctattaataataaccctccatcattctacgccttggacagccttcaagggcaaattcctactttgaaccacctggatagccagtccagagaacattccccagccttgagtgcacacccagacacctccaaccctcactctgagacggaactccgtaaaatgtttcacaccgtggaaattcacctccaacatccggcagcccccgatcggcctatgcatgcatgatttcatccggtaatctgagtccgaatgggggatagataaccaatggaaacaggatgcgttggcagtttcattggacatttcatgcaatttactattagcggaattgtagactctagttatcacgaatgagcggacaatacgcaaggaagagacttgaacgcgaagtcgcgcgcgaatgaacgtgcaagacgtggagaacgtgagggacgtgaaggtatttggtacttacgcggtgtatgcgctagtgccaggatgaccgagtaccgggtacttcggccgcatgaccgacgcgtccaagggatacgcgactatgcagtgctcagcgggggggaattgaccttttggtctttgctccgatgatttcggtaatgatttacggaggacttgtacaggcaattataggggaatgaggaattcattgacaatggcacagtgatatgaataccagttagatcatacgaacagcgcgtagtgatctgcatagtaccattgttcccacacgagacacgagacaagacatccaagaatgaagtcaattggattgtgctgggagctgggaatcggcataaacgccactttttcgaattggcagcctccacaacgtgaacgcgacgcgctttgccggcgtatgcaggccttgaaatagttcccttcgccctccatttgtgactcctcatgttctttattattgctccttgcctctaaccctctgatttcaagctcttaacgcccttaacgtctgaaactattatatctatctcatcgctgcacgtcttttaccccgaatcatccctcgttctctctcttaacggtgtagtcgaccatatcctacccatttcattatccaacctatatccgaccagttccgatcattgaatcattctattgcttttgaatcttttgtcttacccaattgccctctttctcttcggatcgtgcgatcggcctgcctagtgcctatttcagaccgccaatctcccccacttggtgctgaccaaaacaaaacatcccccttcttccttcaccatggccactctcactatgactcctactcgtcagcctttgggctgtttggacacgatgccgttgatgcgatcgaaactaaatcgtcagaaccagcaaaatggtacgtgacgacctatgttttgatgttccgaagacggcttagctcacaatcccaaccaggtgctatgtctatgaagtcaaccccaatgaagagctcgatcttcatcgacgccgattccgagaatatcaatccagcaagcttctccgccaaacggaagcgtacttctgaggacgacgaggagaacagcgcgtcgaagcccatcaaaacatcccgcatggctctttccacccgcataaacatctccccccgtctctcaaccccctcaaagctctctattacaactcccaaatcagctcctattctcaagccggctggtcgctctccaccacccaagtcgagcaagtccgccactcgccgttcgctcatcgccaaaccccgctcagagcaatatagcaagcgcggcgtggctcgtcccttctctcttgcttctgtcctcgctcaatccaaaacttccaagcctgtgcctgcccccaaggccccggcctcatggtgcttcgatatccacgtcgacaccgagcaggaagaaatgaccaacctgatgcatcactcgaccactgtccttgatatcagcgacgacgagggcaagtccgacacttgcccccgtggaaaggagaatattcctcctcacgagctgggcattgaagtccctgtcgctcgtgagtccactgccactactcctgccgtcgctcgcaagttgaagatggatgagccgcgtgctgcgctcggtgagctcgatgctgccgaatactatgccgagggctgcaatgctttgtcgtatacgattgtctatgatgatgaagagcacgcgcctgagttcaagaagccctcgttgcctctttcccggagccaaaagaccgttatcactacctccattgcttctgttttggacgttgtcgctgccgaaaccgagcgccgaaaccttcaggactcaactgacagcaccaagtctgctctttaatctaacttctcgtcattccttgcgtctgcatctgcatctcacggcgctgttctttggccagggtttggccccaatacctatttgcttattctttggcgtctgtctttccggagcatggtgtttgtcgctttttggacactggtgttcagtctatcgggtgttttgatatagcgcttgaattatgtatctgttttgcttattattgcgaccactcgggttgacttgctttatcctgtctaattgatgagttactctctgtgttatgtcttatgctttacgatgtactccgcgtctgcctatgaccctagcaacgataaaatgattattttgatgactatctcgatcacaaagtaccatttcctagacgtagccaatcatctagtaatttagtagcgtctgagtcaggtgacatctcgatattttgtgcagtacgccgcaattcctataccgatcagtttgattcactcgacagttcctgtctcatgaactgtgccacgaacctcgcctttggaaaattttacgcattctactacacaaattgagtatatcgttgtcggtcgtcacagctattgcccctgaatcagtcaaaagacgctcataactacgcaaacagctcaacgagctagatccgatccgatcggcttttcctacctaccatcggccttcttctggccctccagtggagtggcactgaatactcttggaataacccttggatcatcgttcttttcgtacttattggtgttcttctgcgcgcctttgtagctgttcagatctgccagaatgagaaggccacacctccgcgtatcgtccgaaatcgacacatcttgtcgtgaacctggtttgctatcacgcttaatggtgctgaatttgtctttatttactacctaggctcagtccatggcggctcggtgttcgccaaagctcaatttctagctccctttttggttacaggcaatcaaaacggcctcgactactaaatcaagtgtaatgaacctgccgagttatcgttgcagtcgttgccgtgtctattctatccggtttcctcgttatcatgcccgattacaatccaaccacaaaccgtcttcggtcacattagcgatttgaggccagcctactcagtaccttgaaggcagactcggggagtggcggatggattggctaccagattctagttagaatcggtgccgttcttggattgcaacagccgagccttttatgtgggcgtgggtttagcatcgctttccttcgttggaacgatcgcgttggaacttaagtctgccaataagccgaggaacactatacccaatgatgacactgcaatttgagtctggatgtgtttgggggtttgaggtgtatatagcagagctaaacgatggcatgacgtcatttccgggtcccatcgacacctcgtctccgcctctaggtatcttgttagagccaagcaacgaggccatcgctggggcaggctggattgaagtgtcagcgaggcaagttgccttttttctctcctcttcttttttctcgccacaaaaccttgagggcgcatggatcctccttggcataacttgggttttgactcagcttccttaaagagtaaaagggcaacctgcattggcattttcccaaatcatgtggaaatagtacacgaagaagtcccttgcataatgtgacccatctgatcggtacataccaacgtcgtactccgtacgtagcacgaggcaatggaaattattaagctgtgacacataccaagcgggatatttaccgccactgcatgagacacgtcctctacagacatagtccgggaggaaaatggaagcatgagctattgccattgtcgtagaatatagggcccacactttcattgggatgatctttagacaacactccacatctctaactcacttcctttctggacaaacactcgtatcagtataccacaatgacagtctcttccactgtccagcctctcaaggcctctgtgccagcggtcgcacaaacggcagatatgcctcatcgtacactcagcaagtcgatgacctttgccaatctagaccaataccaatattggcatgccgtcggtcctatgctggggaggatgctttccaacggcaactacagcatccatcagcagtatgaatatctgtgtctcttcgcacatatcataatcccaaagctgggaccattcccaggcgggagagacatatacaaatgtctgctcggaggcaccggctccgtggagctcagtcagaatgtccagaaatcaggcttgactgcacgcattgctttcgagcccacaggctacattgctagcaccggagtcgacccgctcaaccggcacacggtgcacgctaccctggccgaattgagggctatcgggtctgccaccatcgacatggagctgcatcaaatgctcgtcaccgagctgacgttgacggaccgcgaggaaaggcttatgtccccgggacagatctccggaactgcgtggaagacgcaaattctgcttgctttagatttgggacagtccggcggcatcacggtcaaggagtatttctacccagcactcaaagcctccgtgaccgggcaaagcgtggccaggttgtgcttttctgctattcggaaagtggacaaggagggaattttcgaatctccgagtaaggtcatcgagacctatatgcaaactcaaacccagacagatctctactttttgtcctgtgatctagtcgatccagcgcaaactaggattaagctttacctcatggagctagacatgaggctggcaaaggttgaggagcactggacaattggcggcaagctcaacgacgaagagactttacttgggctgcaaatgctgcgagagttgtgggtggagtttgggattattgagggcatgcgcaatgagccggagcggccatcgctgcccggggatcccgacactattgttccattcatcatgaactacgagatgaatcccggcgaggtattgcccaagcccaaattctacttccccttggttggcatttcggagctgaaaattgccaacgtgctcactgcattcttcgaacgctacgatatgcctgagcaggccgcagtctatcgcgataatttgcagacatactagtaagtttattctgctgctacatatcgcaatgcttcttgctaacctcgtgttatatcagccccagcaaggacttggctgtcgcaacggatcatcaggcttggctgtccttttcatacactaagaagaaaggaccgtacctgactatgtactatcactagagattttcatgttgatagtcaaggtacgtttgaagcagacaaactagcgcggcttagattgagttgggatgaaataaatgcgtgaacgatgtctgttgtgtgtaatttagaacatactatatactacctggcagttgtgggctcgatgaaaagcgtaccctgcatttctgtacctgcacttgtcggaaagatattgtgcttatgcatcgaccattatgttccgatcacaccgtgcagtgtgtcgatgcctgttcgttccaggaattagtgaatctagcacatggcacacctacaccgctgcataatgaggtattcgaatactccctacaaactgtcaccagccggcagtaaaatacaactgattcacaagcaagggggtattaaaaattctgtagcgcatggcagttttcagctgggattgaactactaagcctatttagaaaaaaaaaaaaaaaacgctcaaaaccaagaatggctcgagaatggaaacttgcaggatagtgacatgcaatatacaatgtcatcggaggtaagaatgtgagatggtatactagttccaacgtaattagacacgtggatagcccgagatagaccgagagcactacaggcagccacggatcgggcaggatgcaagggggatttgccacggccacggcccttctggatgcaataaaagaatgaccgccgagaatcagatattacctacatctgatgtttgcctcccggcagtgcattccatagactatcgattgcctatcgatctccgtcgatccgggttgcgagtgggactgagagaaggcctacttcgagatcacgcgacgattatatgtcgctgcatgcaagtctcatggatcaagtacggcgtggtcacggctgctagatggtagtgtgccgacgaaatttggagagagtcaaaccttactccatacaagatacttgagcattcaactggtgttgtgaaatctgacttgtcaaaagccaggtggataccccgttgtttgaaaatggacatgagcagcgaacaatattcccagtaggaatgcaggagcttcaataaaacaagttcaaacgatcaatataatctcaatctggcttattaaagtagaaaaaagcacatatactatatcgcttccaggataatctcctgctcggcaaccttgaaccacgcttcgcctcgtttccgggcgtcctcctcattcacagcagactttccagcggactttgactcataattttcgacggtgtacgcaaccagcaccttgaggatcgtatctgccaaggcttgcgcaatacactggcggggcccgaagccaaaacgccaaaagcgataccgaaagctggccctagattcctccaggaaccgccggggccggaaggtcattttatcggagccccacgcgtcatcccagatattcagcgcattggtgtcaaccaccatgaaggtcccacgaggaatgcggtatccacccacatcccggtcagtgggcatcgattgcgcataggtgtagttggtgactggcttcagcctcgcagattcattgatacaacttgccagcagagtggtgttgcttgcaatgtatttgacccaagactctggagttgtgtcggacctggtctgtgagatctctgctctaagctcggtctgtaatccgggatcctcagccaggaattgtgggatccaagagaagctgccaatcgtcacatcgatgttggcaaatagtgcttcgtccaatgtatgcatcagctcggttggcgtaatctgaccttgttccacggccctatacaagccaacaatagcacaagcagaggcatcgtcacggttcattgcatattgatacgccttccgattgaagttagcccagcgagtgtggaagacgtgaagcttgttccttatagccgggtaaaatatcttgctgatggaaaagagtgacagaccacccttgaaggcatattgaaacacatcggtgcgcagatcggtaatgtgcaacagctcctctgtcatctccggggacaagtttccatataagaggtcgctaatgacccagaagggcagaagcttgagatcctcggcgggcttgattcgcagcgttttcccgccttcatactgcttgtataactcggaaaaatggcgagaaatacgggaatggacaaatggaacgtatgtcgtgggcttctgggtaaagggtggtgaaactacagcatggactcgtttccagtgtccttgactgatcagaccgacaccatcgccgactagatctcccattacccatccaccatttaggtttgaagccttgtggtggttactagagtctttaaagaccgtcttgatctcatccgcgcgggtcaaaatgctagacttcatttagcctgagcagttcatcttgaagagagcgaacttacatttctggcgtgagtccaacccagatgcgatacaccgggccatatttctcggcccactggcgagagacattctctccttccaggaacttgatactccccccgccatctggaaatcggtagggacaagttggaataggcgttgagccatctgttgaatatattggataccaccagagtaaaaatctctacgttggcagtcagcagagttctgttgatgtactttcggggtattaccgacattgattatgcaggacactactcgatttgaccaagtatttggttgaaaggagtgccacaaaatgactaggagtgatacaactgccagttgcagcgtaagaagaatgtaacctgacatcatgtggagctgacgttggaaagaaggaaaagtaacaaacggaggatataaatgacgattttgaattcgatttgtaatcgatagcatgggtgtaacttcccaaataggtacgtgcggtgatataaaggaacttattacagttcccacaagtgcggctgacaatccgaaacgacatcaccgagtagccagcatcttacatgtacgaagtacatgtgggtccaacgttgatgcacaaggacgaacatgcatggtcgcctcgcgttgattccagcgagcgcatggtgtgttatatgcaagggctagtgaattgttgcaggtgtagccacgcactaagaataattggtggtcagcctcagcgtggcaactataacgacattctttctgctgacagctcattcttggctatttttgaagatatatcgggagaggtcatttggaccgaagtgaaaatgtaccatgtacttgttaccataaaagaaccatcatctatcggaggaagcttgatctcttagaatattgtccaccatcgccatggattcttatcatggtcgtcataatatttccattcctttgggcaaggaattggaagtgaaatgcactgataatggtgtacctcattttctcaaggcatcatgggccttgttgcttgccaggctctcagaaacgcaaacgacaacatttgcagtattggaacaaccggtggtccctcgggatgcgtgttcgaaattggtggcttcatcttcacatttagagacatgggaaatatcagacaatccggatatacttctggtggatgcagcgaaggaaaagcacagagaacctctttcaggcacacagacctcgacgggtgtggtcatcaggtggcatgatgcaccgaacagtccaacctcggtaagaaggactcgatacatgtattcttcgcaatttactaaaagagttccagttgccgtgtgcattcaatgcaatgattgttttgggttgcagcagatcacccggtcaagtatccttggaatacccaagaacatctctcacagtgaaccaagcctggtcacaattgacggctacacttcacattttggaacaaatggttatgaccccagggttatcactccgggaagtggatttcctgggctcatatagcagcaggttaatccagcaatggaacaacccgtatacactcgcacggccacaaatatgcattcataccttgatcctggagcattgtcggagccaacccgatgccgaggcactgtgtgcttgggatggttccatcacgtatgcagagcttgacaaattttcactcgcagtcgcgctccagctgctgtcaattggtgttggcccagagtcagtggtcccgctctacttcgaaaaatcgagctggacggcagtcgccattctgggagtgttgagagcgggaagcgcttttgttctcctcgatccctctcatcctatgacccgtctggtcgatatttgctcggaggtgcaggcaaaagttgccatagtctgggattcattgcaggagctgggtcgacagctgggtcctcgagttatcactctcctcgacacaataaaaagccacgtcgatacaaggagaaaacccttcaacacacaagtcaagccttcaaatgccgcatacatcgcttttacttccggctccaccggcaagcccaaagggatcgtgattgaacaccaatgcttcgttgcaaatacgctggctcagaacgcagttcagaatattaatcaccaaacccgggcgtttcagtttgcctcatatgggtttgatagtagcattcttgaaacactcatgaccctggtggcaggtggttgtgtttgtataccctccgaggagcagcggctcaacggcctggcagatgccatccgtgggatgcgagccaactggctcgaactgactccatctgtggcacgattcatcaaccccgaagaggtaccgcacgtaaaatctgtcttgcttgtcggagagccgatgtctcaagaccatatcaaacaatggtcagggtcgaggaagatccaactcctgaacgcatacggccccgccgagtgcagtgtggtagccactatccagccccatgtggaagtggaagatcctcaaaatatcggtcgctcatacagcagtcactgctggatcgtgaatcctcaagatcatgatcagctcgagcccctgggtgcggtgggagagttactcatcagcggaccaatcgtagcccgaggttatctcaaccagccccaccagaagtctttcatctccaaccctcgttgggcgacgcgatttggcattcctccaggcgaacgcgtttataagactggagatcttgtgagatataatgtcgacgatggcgcgctgcgatatgtggggcgcaaagaccgggaggtcaagattcacgggcaacgtgttgacctgcaggaaattgagcatcatgcctcccagtttcagaagggaatacttgcagtggccgatgtgatccaagtcaacggtagtagcgcggggaaactccttgccttgtttatttccgctgataatgatgatactcgcccgacgaagcacagtttcgttgtccccatgaatgacaccctcctcgatttggtgaccgacttgaaacactggctgcgtgactgtctaccaccatacatgatcccaaccaagtatatgttcgtcaatcgctttcctttaacgagaactagcaaacttgatcgacgagccttgatcgatcttgcagcatccagtcacccgccgacaggagagcatccgtcaaagcagcgtgatagagaagatgtcgagctggacccggagctttttgccaagagaaaaatattgtgctccgtatttgctgaggcattgggctgcccggaacggaacatcggtgcagaggacggtttctacgacatgggagggaattcattggcggctatcgagctagtagcccgtgcacgcaagcgtggcctggaaatcacggtggcggatgtcatccgtcttcagagtccacgagatattgcgcgatgtaccgtggaaagcaaaggggttcatgagatctcgccattctctcttctcgtagaccccgagcagagtctatccgccgcgacagcccagtgtggcgtggagagagcaacgattgaagacatttacccttgcacccctctgcaggaaggtctcatgcatctatccatcattaccccgggagctttcatgggcacataccgattctccttggctccttctacgaaccttcatcggatctgggctgcatgggaacagctttggcttgtacatcccatcctccgaacacgcataattcaacttcaggatggtcaaaagcttcaagtagtcatcatgcaaaagcttccacgcaaagacattttagtcgtggatgattgcgagccgatgagcttggggacaccccttgcacgtttaacatttcatcctggacgggcttgcggcggatctgactctggaatgttcattttgaccatgcaccacgccctttttgatgggtggtcatatttgcagctgctcgaggatctccaggtgatttataatggggacagattgccaccacgccccgccttcaatcatgtcattaactacatctctaatttgaagattgaggaaggtcactctttttggcgtcaacagttcaacgatttacaagcaacaatgttccctatctcttcccggcggtcaatcgcgttgccacattggcaagtcaaaagccagcaaattatcctggcgaagtcggatatgaactggaccctcgccaataaaataaaattggcctgggcccttgtgatctcttcccaaactcactcggatgatgtagtatacggattaacagtctcgggccggaatgccccagtaccagaaatcgatcgtattgctgggccaacttttgcaacattccccttccgcacgcagcttcatgaccagatatcggtggaagatatgttgatccaaatgcgacatcacgacgtctccatcatgccattcgaacatattggtctcaggcgtatcgcggagtcaagcccagacgcagccctggcttgtggattccagaatcttctcaccgtcaggttgcaatctcttcagattcctccgggagccttgattgatttacccgagaatgaagatcatgacctgaaatttgcgtcgtatcccctgtcaattgtggcccagcaggagggcaaattgctagaggtcaaggccatctttaataccgacattctaggatctgacaggactgagtcactgctagagcagtttgatatgttgttacaacgaatccttcgggagcccgggacgacagtgagcaacctgagacgtcagctagctcccgagtggcagcaattagcggcgattaacaggaagatctcgcccgaactgcattgcctacatgatattatccaggacttcagcgtcatccaaccaaattcagaggccgtctgcgcatgggatggctcactcacatataaagaactagtctcgttggcgtggagattggcaggccatatcaagtctttcgggtcccggtcggaacccggtgctgtcatcgggatctgtgtggaaagatcgaaatggtttcccgttgccatcctgggcgtcatgatgtcgggagccgccatggttttgttagaacccaatttccccgtgcctcgtttgcagcatatcttgcgagacgcaggggcacggatgatgatatgctctctggtattccaagagaagtgtacgggcttggtcgatgatatgttgattctgactcccgatattgcgacccgagcggactacgatacttggactttaccatcggtgtctcatcaagatccaatgtatgttgcttttacatccgggtcaaccggtgccccgaagggtgttgtgatcgagcatggcatggtatattcgatgctcgaggcacataaggacataattggcgcatcaaatgggtcccgaggcttgcttttcgcctcgcccgcgtttgatatatgccttgccgagattgtacttatactcggtgccggaggctgcgtatgtgtgccttctgaagctcaacgcatgaacagcttggcgaaaacgatgacaaccatgcaggtcaacatggctatgctgactccttctgtggcacgcaccctctcgccagctgcggtcccttgtctccaaactctgattcttggaggagagccgccatcagcctccgatttggcgacatgggcttcacgggtccagctgcatcaatcctatgggccagccgagtgcactatgtacacaaccactacaccgccattgactcccagctcggacttgggcaacgtcggattttctccaaacgcgtcatgttggatcgttgacccggagaaccatgatgagcttcaaccggttggctccgtgggagaactattgatcggtgggccgattgttggaagaggctatatcaaccgaacccaggagtctgcagcggccttcattcgtgatcctgtctggagcgagaacttccccttcttacgaggagaccgactgtacaagactggagatctcgcttccttgaatgcagacgggtccttaactttggtcggccgaaaggatacacaggtcaagctcaatgggcaacggattgaggtgcacgagattgagcattgtgctgaaaagtaccaacatggtaccgcggtcattgcggaattaatcaaccctgccggcatccagagacctagacttgtcatgttcctctatgatcctgcgacggtagaaacaacggtgggcataaactctgcttgtcttgaacatcgggaactattgctcccaccgtcaacacgaaatcaagcttaccttgaaggtgtaagacatcatctcaatcaataccttccaccgtatatgataccatccctttttctttcgctgtcccgtctaccgcttagcccaagcggcaaggccgaccgcaagacactacgccagattgtttcgaaaatggatagagagacattggagatgtatatggataatccggtggcagagaaaagggaaccaacgacagagcaagagcgattcgtccgtgcaagtttcgccacagccctgtcattgaatgaggaggctgttggcatggacgataacttcttcgctctcggaggtgattctattactgccatgcgcgttctcactttgtgtcggagaaggaacatggccatctcgatgcaggattttctctcaaagaacactgtatccttgttttgcgcaaatgccattgtgattcaggcccaaactgttgattccaagcgccagaaagccctgaattccgaagactccgttcgagggaaaaattatcttgtccagtttgagcatatcgaataccagctggacatggttcgatctcggttgaatttgttgaaatcggattccatcgaggaaatctacccctgctctgacgcccacagtggggtgttggagctctatacgtccaactacacaagcactgcaattttcgaaatttgttccaccgaatcagtgactgcgatacaggtgagcaacgcttggaatcaactagtgcatcgtcatgtcgccttgcgtacagttatgatgaaagaaccaaaggttcatgcagattaccttcatgtagtccttggcaagggaccagctcaaattcttgctcttccttgcagcaagaatgccctcacagagctgaaaaatctcgaaccagtccaattctggggcctgtcaccaccacaccagttaataatcggacaggacgattctggggcggtctttataaggctggaaacggggtatgccttgatcgacgccttttctatgaccattctactagaagagctttctctcctcctccagggtcagcccttgccagagaatggagtctcgtaccgtcaatatctgtcccatttacacagccagtcatctgcagaaacactgcaatactggacacagacgctttatggagtttacccttcccacctacccaaactccctgccaaaccgtcccctctacctgaaccgcgctcgctgagccgctgcctgccattcgcgcaatcaaagcgtttagattccttctggcgttccaatcatctcaccatcaccaatgttttccagctggcatgggccttgactctcacccactacacccattcccgcgacgtgtgcttcggaaccatcacctcggggcgtgatacccctcaccttgaagtatggaatattgttgggtcatttttcaacattcttccgtgtcgaattgcgattgatcccacgcgcacggtgttagatactctccgacagaaccaggaggatattcagcgtcgaaacgaccatcagtactgttccatgccagatatgatccgaaaatctggaataaggagcttagacaaggaccagcagctgttcaatacagttttgacagtacagaacccattctcgacacgatcatctactgtaaaggatgggagcaacgagatcgatatcaaactcatcgatttggatgatgcaactgaggtgagggcctttggaactaggaccacgatcagaccgacaactgctgactcttttagtatgacctttgcgtggctattattccctcccattcccacttgaaggtggaattacgctactggacgacgaccgcatctgaggaatatgcttcggatattctcgattgccttttcaaccagctggaacagattgtgcatcatgcgaccaagccattgagcgccatcaccagtattggatgacaaccatatctcccaggacttccataatttctccttttgttatctaattttcggcattgttcttttgatatttccacactttggattcgcagatattcccgagtcccggtctacattattctcttagcacaatcaacaaaacaatataaagcatgaaatactggataaagttggttaggacttgtcgtccatgcaagtctacgagtgctcaagcatccgattccaaggcaatatcatatcctagaactggtctaaataatagaagagaaacaacaaaaagacaacacatagacagccaccaatatcgtggtcaatggatgaaacgccattcacacccttttccatacccgaacacggttctaagactggttccaactcaaattttgagggagccggtcgcggaagggaaaatatcgaaaagaaaaatccatgtacacaaaagaaaaggggaaaaaatgggaaaaagacaaataaaaggcagggggcacaggttgagggcatcggtccggacgagtaccgccgaaaatctcaaacaaaaatatcgttgccccatagtcgctatgtcatcacagtagaaaataaacggaaatcacatgtccatcagcagtccatctcctccgagacattatttggtggaattgcttcgatgcaagatctgtacattggttgcactggtaccactgccgaccgatcgtcgtcgcgggcgaatctcactgccgcttccgctccttcgccgtcggccggtgcttcgaatcgagcctcggcgtcgtgtctggagcaaacggacgttttcacgttagaattacgctggctgtacatgggcggacgcggtctcttagcaaaagacaagtacgagggcgatagggccagacaaaagggaagtagttcgcataggaatgcacgtatctgggcagcaaagcagcacggatcagagatgcactggacttaccgaattaggggtgccttcccggctgggccgatccttggaaatatcgggatcatcttgcaactttagggagttcaaccgcttttggctctcgtgagtcatggcctctacctcatcgatcgcctccggcacgtcaagagggggggctggtggtgggggaatgccgttcttccgatctttggcctgttgctcaatcacgtcccaccgttccgaacgaatcttttcacgttggtctgcgttgttctggtgctccgtgtaatcgtgagagcattcatcgaaaagttgcgggttgatctccatgaacatcttcatggcattgtaaaccatgctgtggattgttctgggaaaagagtcagttcatatttaagcagcacatgcagatcaaactcaccggttccagtgtcctttcgagttctcgtaaagtggcgcaaacataagagggagaattgtctccacattgtcgctcacaagattacagaaatactcgttattccagaagtacaaagcacgttcagcaacctggaaatgaggactggcgacagacttggccaactgattgaacagaggctcctgtactttagcgaactcgcccggatccatcacctcgaagatatcttccacctcattcaggtacataacctccttagtgctattggtcttaggccagaagcgcagtaggccgagaacaacctagacatagtggttagtacccgaagtagattggagatgataatttagggcttacatcttcggtcaatgaggagtctttctccaaaaattgcactatgcagtaggccaattgcgggtggtacatgctgagactcttcaccttgtgcatgggtaggagcactctagtcaagaagagcttgtgttcctcctttagcggtaaagcgaacccgttgatgatggagcccagaatctcaagcaattcggcgattccgttatggcgttctgtctcgtacatgaactggaaaaagacgttgttgatggatcggcggatatatgaccgcaaattcaagaactttccatagatgcgatgcagagttgtcttgaggaagtcacgttcccggggatcttccgagtcaaagagatccaacaactagatgtagtattagcttgtattaaacatggaaccgagcagcaggagacataccgaaagcacaaactgatggtcgatataaccctttgcgatgttcgtgttgaaatcctggctttcgatgaatctcaaaaagaattcatataccacctggatatgaggccaagcgacttccaagaccggctcatcctcctctgggtcaaatgcctcaccttggggcgtcataggcgggggaataggacggaacaggttcttggcgaacatctctaccacgcgggggtacataggctctgtaatgaccgaccgattgttggcaacataatctaagagttcgtgcagcgccagcctcttgatctccttggacttcatatcagccgtagggtcgttgaaatcgaatatgatattgcactggtcgatcttttgcatgaacaaatcttggcgccggttgggaggcacttcgtggaatcccggcaacttctccaattctctctgacgctggtcggagatgtcgaatcgcgacgaatgttggcgttttggggtccggataccttccgagatgtccttaggagttgtctgtaggcgatcgaagacatgggacttcctaggaggtgcaagatctccgggcattgtttcggcggcaccaggaggggggacatgctatgtaatccaatccattagaaaattcaaatagtgaaagctgagccaactggacttaccggtgggcttgggctaatgatgacgttgggggccgctggttggccttgcctattcggagttcctggtccattgcttacaggctgtccggcagtgcccggttggggtatatagtgttgaaccggggtgccggggtgaggtgcgcccgcagaaggggttccggcgggggaagcgttgtctggagatttgtttcgcgagtcattgagagaggttgtagaggatgtgggtgtcccttgactaggggaagtaggctgctgtgcgctggaaattccgagggattggttctgtggagtggagttggagtctttctttttcgaggacttgttgtctttcgcccgcgacaactggtcgtgctaaaagcaagacacaaaatgttagcttatttgcgaggtaaatgaggtagcaccagctgcaaggtggagaagaggatagattgccagaagtgatagtgcggtgaggtgcacttggacaggatacgcgggtaactcacgactctctgtctgaaacccttcattttgatgattatgtagatggccacatgtactcggctatgtttcttggtgccagtgcagccaggcggcgcactctagccggaatatatcgaaggagccaactgaaatagccgcccaagatagccacgagggggtggggggacaagtgtttgaattgacctaataggagaatctcataagcggtccgagtcacacagcaggtaagacggttattgtgaagggagatagttctgaaattctgatataaagccctgggaatgcgtggaggagaagctggggttcaatggcaacatcatcaggcgctccaaacaatgtgcagtcgcagcacgcgcacggagcaagacgatgataggaagaaagggccaatgcaggcagtgggagacgagagtccgatcaaacgtacctctgtagatctgagttggacaattgacggatcgagtggcaaatttctcggcgagagcagttgttataggacaagcttggtcggcgctggaggatctccgtgtcgcttagtggcaggctgggagcggggggtttggtagcaccagacgggcactcaggtcgcagcccactgcgaaagcacgaaaatcacggtctgactagcaagagacaaagtggacgatgtacaagagaccaagtaaagatgatgtcgttgggttgtggagaggggagagggaagtggattgttgttgaggtgtagggaaaggcgggctagttctcctggctgcgatggtgatgggggggaccacgcccaagtactatgtggtggactttacgttctggctaagtggcctggatctattcgccctttaatttgagacaatgaatttactcgacagctatattattccccccttctcttctcctaacatcactttggtatgctttttcccgcttgtttcaaattatgcttatgtcatggctcacgtgacctataaaggaactcgaatttcaggcacagacagcaacgccaccaacaccggacacccaggtaactgactctacctattcacggagtagctaactgactagttagttagtcaattagtgattgaatgtgtttgcctattatttaagtctgaagaagtcagatgtagttcacatgtgatatatcctttcgagtcaagcaaagcaggtctgtgctctacgacaacaatagtctacaacaacaatagctgtgtgaggcataaccttaggctacagaggaaatttctacttgaaaggtctcgatatttccgaaaatcaatcttatggcatatcataaggtatagcactgctgaatgttgtcgcgcaaaataattcggagaagtggacatatatatctttccaaaggactacattagtatttctctccttcacatcaccacaaccaacgcggataaacacctatcagccttccttacttgcaatcctcgccatacttcccgatctctgtttctttaccaactaaacccttacttgaatactgaccgttacttgatcactggctcttactttccttcttcatgctcaacggtctttgacattacctccaatactcttagcttccaccatggcggacttcatcatgcctcggatcgcatgtcaggatatagacgcgctatcttcggacaaagagaccaagcccctacgcgagtcatgccacgaaaccatttatctggatactctttggtgtctgcaatgttttcgcttccaagtcagcaattggaatgatgatagttaccccttttatgtgatgtgtcgaattgaagtcggctcgccacaaaagtgttgcgattgcaaagaagccggctacaaatgtgactggggaagctttgactcttgctaaacctgtgcttgaaatagatgcttacatcgattgggatcttctacagatcccgcagggtattcggggccatgtctttgaactgatggccttgatcgaattcgcgaaaagatactggaccgacaacggcggtatcggcggtgtacccatgcatgtacgggtccggtgtgaagatgtccccgaggaacatttccccgcgttaattgagctctttcctgcctttgatgacctagtcgagacccatatgaaggctcatatgctgacaggcaatggctctaacgtgagttttgttcaacgtgttctacattcgtgaggatattaatcctttacggtgggctttcgtgattgtatcaccggggttatattcacgatttgctttttttttccgccagcttcttcattgtgaggtttcctgttaatagagtggtgaggcggctattgaccaggacctatttgatgttttcctgcctggttctgtggttgtttcagtgcccttacatagcatctttttccagctttctgcatcatttagaattctagactctaccaagcgcaaatgatcctcatatttactaggcgaagacataaggtttaccaaacaaggtcgacaggataggagatagcaacatcggaggtcaaaatgcacctcataactaacagcgtctacattagtaccgcaaagttacgagaaaatatagaacgcaaagagaagagacactagacttggagccaaaaatgtcccaaaagtttctgatccgtttatcattgaccactccctagaagtatagttaccagaaagacagaaattgctcgaaccaactaattacatttgatattcaccgagtttcgttcaaatccatacaacctcattgagtcaacattagaaccagcgatcgtacggccatgagggctctacccaagctcaggcgtgtgcttgacacagcactatttttctcacttgtgctactaacaccggcagctgtattttcctcagcatatgtgtagtaaagactagcggctgtctgcgtgcctagactatcagcagcagtggtagtgggcaaactggccgccgagctcgacgaccattcttttgcgaaaggatagaatcctgtcgtttgagggttggcactacagtagcgctcgagacccccatcacgtaactctgcgggaaccagtggtagcctgtgtaaatgttagtttttcaatcaaaccagagaaaagcatagcgccaatatattctgtggaaaagacccaccctcaatgcctccatgttttctgaaacactcctgacaaccggccgctgagtcaaagaagggatatacgtcacaatagcattgctgctggacatcccaatggtccgaatacggcacaaggcctgaaaatgtgccgttcatgttccagaaataacaattagaatttaattcccgcttgtcgttgacatggagcctcgtcgatcagatatgtgggcttgggaccctaggtcgcgatagtagagttaggtaagtactctacgaaataacgtaatcggtaagcgagccgccactgtaagcgagccgccaccctatccaaaacgcgtccatgaattagcacctagttagttcaaccacccaccatgccaccaattcgctctcaatccgctagcaaattagaacagcaagagggtaggcttttattagctatccaggctcttcaaaacggagatattagctctattactcttgctgcgcgtacttttagtatcccgcgtacaactttacgcgaccgcctctctggctgttctcaacgaagtactacacgcgctaactcgtctaaattaactgcaattgaagaggaatctcttcaaaaatggattctctctatggattctcgtggatcagctccccggccctctatggtacaagaaatggcgaatcttcttcttgaaaagcgcggaactaccccagtcattttggttggcgaaaaatgggtttacaatttcataaaacgacgccctcttctttcctctcggttcttaagacgttataattatgagcgcgcgaagtgtgaagacccaaaaatcattggagaatggtttaatcttgttcaaaaaactattattcaatttgggattgacccagacgatatttataacttcgataagaccggatttgcaatgggattaattgtaacggtaaaggttataatcccggttctttcggttggcgaaaaatgggtttacaattttataaaacgatacccttctctttcctcgcggttcttaagacgttataattacgagcgcgcgaaatgtgaagacccaaaaatcattggagaatggtttaatcttatttaaaaaaccatcatttaatttggaattaacctagacgatatttataacttcgataagaccggatttgtaataggattaactgtaacggtaaaggttataataagaagtgaatactacggtcggagattacttttataacccggaaatcgcgagtgggtgactgcaattaaatgtataaactcggcaggatgggccctccctctgtgtattatttttaaaggtaaggtcttccttaaatcatggtttaaaggccttcctagcgactagcgctttgaagttagtctaaatgggtagatatcagatgaaataggccttcgttggctacaaaagctctttattctaactacttcttcttgtataaagggagtatatcgacttttggtactcgatggccatggaagccatttaaccctaaaattcgatgagatttgtgagaaaaataagattataccaatttgtatgccactgcatttatcttaccttttacaacccctcgatatcggttgttttgcggtggtaaaacggtcgtacggccggttggttgagataaaaatgcggactgggattaaccatattgataaacttgagttcttagaagcatatccctctgtacgaattgaagctttaaaattggagacaattaaaaatagcttcttagcagctggtttaatacctttttcacctaatcgggtactttcaaaactcaatattcatcttcgaataccaaccccccctcccagcaggggtagcgattcaagccggaattttaccccaaaaaccccttttaatggcaaagatctacgtcgataggcttcgtcaatcaaagctttacttcgtacccaatctcgaagcctaataagcccttctaagtgtgcattagatcaacttgtcaaaggctgctagattgcaatgcatagtgctattctactagcaaaagaaaacaaggatttacgggatgaaaatgagaataagaagcaaaagcgggctagatctagacggcagatacctgccgaagaaggcctctcagttcaagaagcttctgaaataattgctagactggtggaagcatcagaaacacccctatatcccccggacggaagcactcaatcagggttggaaccacgaccacgggctgcaccaaggtgtagtgggtgtggaaagatagggcataagatcaataggtgttcagataaatgatcctttttagtttaattaatttaatggcgttttggttgaaatatattccttagaaaactatactcttgggtagggtggcggctcgcttacagtggcggctcgcttaccgattacgttagttagttacctattttaccatcctccttataatgaccgtcgctatattactttccctaattaacattagttcggataccactatagaggatatagtatctatagtagtttcgggcatatacccctcttacttaatagtttctattttccttttttaccgccgcgtccgtggtgatatctcccgatataacgataacgaggatgatattattaacgtgcccggtataactaaagcttatctagggatccttccactacctcggtatcattagtaccatgattaacaggtatacgatcatctatattagcattgtcatctttttcagcttctggccaagtataatagacccaatagtagagacaatgaactagagcattgtggcaatcgggggcagcgtcttccttgccattatatactacgttgtgcgcgcccggcacatctacaagggtcctattgtggaagtctccttatagagagttgttgcatagactttgagggagaggctaatagttcatttttagcttttcataacgggtaattaaagtcaaggtggtaaacataagacattagtaactttgcactccaattgagctattctcaaaagacaccaacaaccctttcccgtcgcctttgtgtggaacgggtgatacgcctgtaagttcagacttcgattcatggttttcagtacgaagtgacgcaggtatccttgcttgaggccaattgggtcggtctactctccatgttcttctatatacagccggatacaatgttggacctggactcaacgcacaaggtcaaacaacaaaaaaagacgcgttcaggacgctggtaactgatcaatacaaagtaatatacagactgttaaccccttccggtgaagttaacaagagcacctaaaacctcactcaaataatactacagcatgagtggagtccgacatatgcaaatggcggtgcgttttcaactttttcaagtcgtgttcaatcgtaatccatcccttggatacctcttccctttcctgggccgtggattctcgcatctcttcgagtccttgcgaaattcgacccattacaatcatgcatttttgatgtctgcctagcgagtcattgatctctctgactatcccgcttaggggatatcctgctagaccccataaccctgattaagattagcttgtaaacaataagatcacagaaacattgcctgcatgttccacatacctgctgtcggcttgagaaacaacccaccgattcctttcccgatacctttgagaagccccttagcacctccgtgcttaagaccacggtgcggctgtgttcctaggcccttgataccgaagtaaaatccatctcggaactcctgtacatatgttagaatatctggccctagactggcgctggtatggctgttactacctttcctgccgccctgaacccgcttcgaagattgaccacctgggggatgtcggttactgtcgtgtcgttatataatttgggtgcgttgtggaaacctctggccatgctcagtgacaaatcggttggtaccactatgattatcttcaataatttcttggacatttgacttccgtgtaacgcagcttcgtgtaaaatagtgaatttaggtggatttgtcggtgtcatcgagctgctcattgtcttggccttctcgagctggatattccttttgcgttctgtgctccgaatacgatcaatgctgttgacatcggtttcattgtccgcatcggtagtatcttcctgggcactctccccttctaggatttcaccatctcgctgttcctcattctcaatctgcaattgctcgttctcattttgaatctgtgtttcctcagtcccatcactattctctggagataaatgatccggtgaagaaagtactgcccgacatgctgcgtggcgatcaaaatgttcatggggttggcgtattgagcgagcagcagaaacaatatcatgcacaatctctctgggagcatcgacaagcccagtcacgaagctcgtaatgactccaaagagcacctgagcactagcagtaagtgggtcggcagggtccagcaatgtatcatactcgattggacggtaactggaggcgaatcagcaagaaactctcacagctgtggtgactttgtggaacaagacttacagcacgagcatatctgggctgatcttccctgatctcactagaaccgttgctgcaaaggcactgaggttgattttggtatgtttgagatgccaagccgccggctgattcgggactatagagcatctgtatgactgggggtcaagatttcgatgaaagctattcaccccatggcgcacgccagactcttcctgcattttcaacgcgatcgtctgtgctctctctagagtacttggctctagcgctttcgcgattgcgtttgagagattctgcacgttcaaatttttatgtggtattggtgctggcccagctccagcccgcgcaacgatgtttccccagaattgctggtctccaaagaaagggacaattatcgtcggtcgacctagcgcgagccctgccgctgtggtgccagcaccaccatggtggataacacatgaaacctgccgaaacagccaatcgtgagggcagtttccaatcatcagaatattgtccggcacttcgtctgcccccaggtttccccagccttttgagataagagcccgctgtccggaatttttgactgcttcaaatatggtttttgtcagtttggtaggattatcaactacgatcgagccaaatccaatgtatattggttttggccctgcgtcgagaaatgcagctatttccgttggtggtgtgtagctggtctctgataggaggaagccaaagccgcatacatcgatgttatcagcccaatcagggggcttaggtagtaatgaaggggacctgtttcaaatattagaatacttttgccaaccaggaatatgttactaaccacatatacgtatgtggcacatgtagtcggtgtagtatgcttggggcagtcattgtatccaggggttggagtgccaaggtatttttgcgaagtgtgttcagaatatctcctaatccttcccataccatcatatcgacgatattgtaggacacgaaatttgcgaaagttggcttgcagttccggcggtgaacattcgctaacggatgaggaaaagactgggttggtgaccagggcatcctattattgattaggtgttcagtatatgaaaggcgcatagagattactatataagagggtcaactcacgtgaatataatatggagagggatgcccagtcgtcgggcgcaatgaatatgggcaaggctaggagggtttgctataatagcatccgccacaaagggccgctgtcggtaatccactgtcttactgaatgggtcttccttaatctggtgaaggtaagtcccatcacccttttcaaagcaagatttccaacatccattgaagatttccttcatctcacggcgacgcctctggatatctccgctgcgtattgccttgaaccccggtaaaaggcccggatttttgaccatataagccatcagctcctctgggtctcctccgatattgaagaactctagaccgctatcgagaacaaactgccgaaaagctaaatgtgtggccaatctgactcgatgaccgtgtgctttcagttctctccctagtgccacaaatggttgaatatcgcctcgagaaccaatcacttggatgacgaggtttaaatgcagtgggaaatgctcatcattcgtgtagggccgttccgcgctgacagcgcattcggaatctcgctcagaatgtatatccgcgcgttggatgtgcttcaatagccctccgaggtgcgctttatgctgatcgatatggatatccactcggccgtcacctacaacaaaatgtgatcccgttagtgcaaagtcagtgattctcgccggaacattttttacctagaatacgggcgttcaacccatcctcgaaaaattgcactccatcggggtcatctgatgctcgcttagtatcttcactcgaccaaccacccgagcgattgatgtccattctctcgagtgatatttctgcaggatttggtgctagtacagttgccatgatcgacaggggtatggcgcgtgggatggttagaggaataattgtgagattgacgatcaggaaaagcgatggtcaagacgaggcaagacaaaaagtccaacacgtggcgaggtctccttggactctcgcactctcgccttctcgtaactctgacaaatccaagttcaaaatgccattcatgttatgttttggtggttaatgacgtctgtagactgcttacgcccaaggtatgtgaaactttagctttatgtgaacgatcgctgggtctagatcaccttgctcgtcagtcaatgcctaggtcattctcggtcggattatatttactggtaacaagtagaccgcggcacggtttacggcagtctgcagccgccagtgcgccagtagatattttgcccaactcctctgagccaggggagaggtatcctagaagcgtttactcgattcagtggagatggaatctgataaaaaaaaaaccaccagaatctgatggaaattactaggttgctgatacacgaaaatggatgcttcccttttttatgaatgttccttcctaataatatccccccgctcgaaagcggtcgcccggaggcctccttctccttctgccagcattatccgtatttcccatatcccctcccacaacgataatgaaacaatatcgttatcgtactatatgccgcagcctaggctcaatatgacggctgattttgtttccgctgagtatcttccactatatgcgattgcatagagccaggaggtgagattgcagaaactcttgaacggcgatagaaggggactgaggaggcgttggatgactcgtgcagtttgactgggatctagggatgaagcccgaatcatccaaccagggctttctcttgaatttacagcgaacgaggacggaactatattcaaagtcttcggccaagggcatctgccgctcgcgccagaatccggagctacgttgcagcggagccagatttggcccccgtttccggctgggatgaagacactaccatcaactgcctatgaaggtttagtgtgtaaaacaatgttcccctcctcttcttccgcaagcttcgtatacgcccgtcttacatagaacacaaaaggctgctttgatgctgtaaatcatagattggaagatagtccaaatacctaaaacttcaatatgacatcgttaaaggacaatgtcaattatgtaaccatcccgttaaactctggaaagggcctcagaagtaacaaaaagctaactcaatgatcaatcaagaagaacgtatgaaaaacaggtaagacagtaagtgccaatatttcgacttgcagagaaataaatcgggatattgatgccataagacctaatcagctccagaaaggctcctgcaaaatcttgaccatggcaatgttttttctcttgtcttcttccttcttccgatttaacttgttcagcctgtacggggtgatagtggcgggaaattcctaaatcatagattggaagatagtccaaatacctaaaacttcaatatgacatcgttaaaggacaatgtcaattatgtaaccatcccgttaaactctggaaagggcctcagaagtaacaaaaagctaactcaatgatcaatcaagaagaacgtatgaaaaacaggtaagacagtaagtgccaatatttcgacttgcagagaaataaatcgggatattgatgccataagacctaatcagctccaaaaaggctcctgcaaaatcttgaccatggcaatgttttttctcttgtcttcttccttcttccgatttaacttgttcagcctgtacggggtgatagtggcggtaacttcacaccctaggtgagcatcctatgcaccgagggcgtgagtcccactcatcctgggtgagcttacttattctaggtcgcgttagcatattaaatttatatagagttttctaattacggatttctatatcgattctaatataagttgtggcacctatatacatctatcacgggtaggaggttacttattgaacgaccttaagaagatttgttaaagcttaatatacttcgagccggcttttaaagccatttttctagagggaagactcggtaatgaatacggacgaagcaattggctagataatagaattttgtacaccaaaatttatcccgaaagtagagcattaccgttattaggcgagtttcgactataagggagctagtactactcttgaaccctaattataataagatgtttagttagaactttctctatctgctaaacaatccctataaaataatcgagttccgacgcggagcggcgagtactttagtgtaagacgtctttatttatatagagattgcgatgtcctttctcgaagcctaggtccgactaggagatgtggaacgtcttaagagtgtgcccgccactattggcggtctttagtgattcatccaagctgcgaagctgccagacggcattactagattatttgactcccggtatcttaagttattcttcgtagggaagaatcaaagtgcattccgtgagccaaaaccgcttggtaatctttcaccaatttttcacatccaggctaataaggtttcatcgctgcttcaaggggaaaggcatattgaatgattgattgattagatgtgtgtggcttgagtacggctgagcggacggggagccctattttccacaccctatggtcgtatgtgttaggtcagtcacgtgttagatatcattatagaatgaaatcaatttagggaattggcgagaagaaatttaagcaggtggggtccacgattacggagtactctaaaccattatgtgatttaataatgaataggattgaggaccaaccgctctctttttagctgcaagaatgcacgaccaagtagtataagtgggttcatgcggggcggccacaattatacgactcactcagctccaatcccagtcgactagggtacaggcccaagctccaaatcttcataaccgctagtgttcctccgtggctccctagcgacaacatatgatgtcccaaagggtaccccaaatgccgcccatgaacagcgcggtgcccaagcccatccgctgtggtctaggaattccccagcatgagacggaacgtgataccatcgaatcgcaaaccaggcgaagaaaataccaataagacttccgcccataatgtcccagccagcgtgcatataatctgcatacctagtcgcgcagatgtagagggctacgcctataggagatagaacgagtagaagaaggtataggggcggagcggttgcggacgagcgagtggggatggggtcgtgtgtagtctgcgcgaggctgttatttcgatcccgctgtcctatttggggagtgagacgaaatggcataggaaagcgaacggcaaacttgatgctgagccagagggtgaggtagagaagcccggcccacgagaacgatgagtggccggatggaaaggcggcgaacccatccttcacaatactagcatcggtgtttcgacatatgctgctggtgaccatgataggggctgatgcctgcttgagaccaaggcccccaacaatgtagtcggcaacgtttgagagatcagggtcgcagcgggcaaggaagtccggtcggggcttccctacgacatcctttaggccagatgtcacgaagaaggcacctgctaaactaaggccaagtcctagccatcctgcatgccattcccatagtcgacgtctccacacgctccctccgtcaccgtggctcgatgttttgatggccgatgaagggatcaggagagatagtgctaggattgtgatggcaggcgcaccgcaagcgacgattgcaacgacggtgatgctgacagtatcggaaaggaggggatatgatatttggggatcttcgagagagaacgcatggcgataacccgtgatcttgtacaacacaccacctacagcggcaacaaggcttcatatttcaattagtaagggacggaggagtcctatgggaataatcgaacgaacatgatgatggcccaatcgagcacgtaagaaaatatcaactgaatagaggatctctctcctgaaaggagcctactatccagatttcctggattatatgccatgggtagagatttgagcgggtagtaaaagtcacgagagcaaaaggcgaggtaggaaaagaacacgatatgaattagcttgaaaaactattggctggattactggcgcctttgacatttacaaatagacctgctagtttcagatccaatctaggccgcggtttgcggaaataaagaaagccgagggcattcctttgggagcgtacagcccaggccccacttagggcatacaggtccatttgctatggaccttctaataccgggaacattaccatatatcgtagatactgtagaagcacgtgcgcagtttccggtccataaaagttggtaactggactgacttggacgacaggatttatactatttacatgcatcatgctctgtccgttgatccaagtctgtttttgttactttccattccacggagttgcctttcaaacggcatgcaatgagttataatgcaaccgaattcttctttaggggagctaggtcactagttagtagcgtacccgatgatgctaacaagaaaataaccaaataagcctggtttcataccttccgtacccgccactggggacgaattggtcactctgaatggctttgcaaccctccattctgagttgcctccgaaggcatcaaaatggcaatcctgctgccactttgaattgagtttctggataccgggttgaaaggccgctgtcaatccagccattcacttgtctgtgcgcacggtactcttcttccaggtcgtggatatgtactttcaatagatagcgcggaaatacaattactaatacgataaccatggcaatgcggattctatagttcatggtcatgatagaagcggttggtgatgtgaaggctttcgggtacactttcattgataaatatgtcgacagataaaaacgaacgatatatggtggtggtgttgcccaataggaatccagacaataccagggctttatccagataactcaatgttgccaacttccgacttccaatccaaatttacaacaattcattcttggcacgaaagctgggtttgtaccgtacattgtatgtgttccgtcaccggtcaagcaattccacaaaagcaggtagagataaaagatatcggatttaatcttgcagcgaatataggcagaaaataacaaacctctaatcaaatcccatagggccaatgggagggttaaatgaaggcacgtgatactgactgtcgatctatagacgagggaataggcgtggcagtttctttgggaataaccttatcatcgctatcattccctgcaaagcactgtacacatgaccatattgtcgagagatcccactatgaggcttggcggtaaacaaaaagaataaaagaagaacatagtgcatggaccatgtctccacaccgcactggcccaaatgggttaagggggttaattttaattgatgaccctgcaggtaaccccaaatagaacagaagaatgtcactcgcgccacgctattcgtcacaggtaataatatccatctgcctggcgctctcggcaactctcgccccgtcagggttcagcctaggcaaacccagaatctccacctagtagccgataaaccctttgacagaaaatcgtggtacggcgagtgtattggtcacattcaatggcagtaaaatctctaactaaaatcaacagggtccgaaattgacaatttgcccaggtggtacgacacgattagtaagcaaaatgcagataactacaacatacaagtcacaagcggtctgtaaaaagacaggtaaagtaaggtaccaatcgtgattcttgacaacctggtttctatggcgccggtatggagtcaaacaattctgctgcctaaccaagtgccgtgggagatctgtattggttagaagagggcgcatttggattgccagaaacggcacattgcaagtgagcacggcccaattgtttggtttatcttttttatctattaccaacttgctctgagacacggatcggatttctatcatggatatgcttctggtggcacgagctggtattgtttgttgttaagaagaagcctgcagctgatacgtaacccgccagacggaggtgagaaccgtatcgcatgctggctttgcgacaaggggtgagcgtggaacatcagcgaggaagaagcgacacgatctcaatgaagatttagagagtctgagggggccgtgaaaatggggagacgcgtacttgtctagatcagactcctgaggcagtaggcgaggtatcccagtctgttgaacgtcttatcttgggatcagagcactggcgcatgggctagcgaagcaggctagctttttgtttttcgttgcttgttccagtcatattccatactgcggccgatttttcggtttgatcccgcttgcttcggggtcaatgaaacgttatatattgcacaggcgagcggcgcagtccgaaacacgtaggaaatgcaatataaaccgaaaagcaataagctagcaggaaaactctgtatagcctaccgttgttgaaatatcaagttgtgatttatctcatttactagtgtttcggactctgccactcgcatgtgaaatacggtagattatgcgtctgggtgttctctgaaagttcttcctagcccctttctgtattccaagtgtagatcaacgatctgcatgtactgagtagactggacggagctagaccagtacagtatcagccgtttccaaaattcccagacactacggagtacttctttcccaagcacggaataaatccgcaccttatccgagaaaccatcgatactccatcgatagcaaagtttcgtacgggaaatttaggtgcctagcaccgcttgggtgggtgatgcagggacacagacccaaaagaagaacaagcagcgactaaaaaagcttggcctagtagccaatcagctaataatcttcgcggtggcttttcatcctgcttcccacttttcgagtgttctgatagtccacaatcaattcgggcgtcgtaagctcttcatctaccagcaatggacttcggcgaggactcggcaacacggcctctggacggattaactctcccttgtgtggatcgcggccaggtgaagccggacttcggttcccatagatctattgttgcagtgaattttcatgatgtggtactttttttcctatctctcagcggtacttgagaatctgcccctgttggtgggagcaaggatctttttctagcgctattttctggttatcagtcctttccctcattaggctttgcgttgccaaatgtgccccgacttctcaagctcaagagctctattcaaaatgtttcaattattcacaaggtttaagcatcctaacactgagagagtcaaaaaaggcgttgcagcgccgccactccactacgccaaagtcagtcgacacggaagatgctttcgaagcagagttggcaggcaatgttccgttgagtgttcttggggggactcagtttgaggcagagccggactatcttgtcaacaaccaggaggtcgttcacgcaatcatcttacccaattatgaagaaaattttgataccttatggaccacgctccatgttctagccagtcaccctagagctgccagtcagtatgaggtgagttccgttctagtcgttcatttcttcatgaaggagctatattgaccgatgattgttccaaactagatctaccttgcaatggaacaaaaggagctcgaggcccctgcaaaagcggtcagtctagtttcaacttttgaaaccagattttctcacattgaagccacgttccatccgtctggagtaccaggcgagatagccgggaagagttccaacgtcgcatacgccgctcaacgtatcatcaattcacacagaagagacgacagggaggatttgaccaataaattaatcactgttattgatggtgtgtcgagatatatccatctcctattaagacttcaccatgctgataacccttacgggtagccgatacccatctattgcaggattacttcaatgagatccaacgacttcacttcgacgatattgccagccccgaactatccttctatacttgtcccatcatcttcgatcgaaactcatccgaaacaccgattctagtccgctgtgcagatatgatgtgggcattcgcaggtgtctcagccatgtaccctggatccccgatctccattcccacctccgtatatacccttcctctcagcatggcagaacgagttgggggatgggacagtgatgctggggcaattggtgaagacatgcatatgcttctcaagtgctactttgccatggatggcaacatcaccacacgtgttgtcgcaagccccgtgagccaatgtaatatatccagcaatgagcatcgtggctggcgccagaacatggatattttggcagctcgctatcgtcaagctttgcgccatatgtggggtgcactggatacgggatttttcattcggcagagtgctgccaacctgtcgcgtcccagctggcgaatccttttcagcgggacgcaatgggcccttgcacatcttctcttcgaggcgcacttccttccatgtcatttgataattacgttggctatatcatctatttattccgctttcatttccccggagtctatgcatccggatttggagtggacatttcaattcactggcgttctgcgggtttgttcctttattatgatgaacatctgcatgatagtctatggacattggcataatttctgcgtcaatacccgtcttacggacatgatggatgccggtgtccctgatgcgggcttttcattccgaaatgagtggaatggcggtactcttctcgagcgtatcctttttcccgtggcgggaacattgttcgggcctgtcccggccatccaagctgtcttttctcatttctggactgatagattggtatataaagtaagccaaaagccaagcttcggtccaagctctgtctaaaagatatatcttctcttgcaggctgagacttgggtttccatgtggcgatgagaaatggtcttcagttcactccagttctggcttttggtctggtattacactcattttaagatagtgtgcacaggaattttatagattttctttctgtatctctactgattgaatacaatttcttgggttgctgctcaagtcagtagatagcctcgtctcttcctctcttcttctcctatctgtccgcgatcatcgtacagaatatcacccacagtttctctttgcatctaaattctgtagatctagacatgtgcactttttcatgcccgtgattgctcccctgggtctttggcgctgattgaactgattcatctaaccttccaatgagcaggtcttgttttcaatacgaaatcgactgtggcaagtaagcttggtggggaagatgatgatattatgaaccccttgttgggggtgctaactagctaactatgactaagctgtgacannnnnnnnnnnnnnnnnnnnnnnnnnnnnnnnnnnnnnnnnnnnnnnnnnnnnnnnnnnnnnnnnnnnnnnnnnnnnnnnnnnnnnnnnnnnnnnnnnnnnnnnnnnnnnnnnnnnnnnnnnnnnnnnnnnnnnnnnnnnnnnnnnnnnnnnnnnnnnnnnnnnnnnnnnnnnnnnnnnnnnnnnnnnnnnnnnnnnnnnnnnnnnnnnnnnnnnnnnnnnnnnnnnnnnnnnnnnnnnnnnnnnnnnnnnnnnnnnnnnnnnnnnnnnnnnnnnnnnnnnnnnnnnnnnnnnnnnnnnnnnnnnnnnnnnnnnnnnnnnnnnnnnnnnnnnnnnnnnnnnnnnnnnnnnnnnnnnnnnnnnnnnnnnnnnnnnnnnnnnnnnnnnnnnnnnnnnnnnnnnnnnnnnnnnnnnnnnnnnnnnnnnnnnnnnnnnnnnnnnnnnnnnnnnnnnnnnnnnnnnnnnnnnnnnnnnnnnnnnnnnnnnnnnnnnnnnnnnnnnnnnnnnnnnnnnnnnnnnnnnnnnnnnnnnnnnnnnnnnnnnnnnnnnnnnnnnnnnnnnnnnnnnnnnnnnnnnnnnnnnnnnnnnnnnnaacgcccggggtcgtacggtggcccctcggtggccgcttcgagaggagcttcgcagtggttgccacgttcttcatcgcctagcagtaacgggctccctggttgggcttggtcgtcaggagcagcgctttgttgaagttggcaggggcggtggaacaggttttcccagcgtctgatggctcggcgctgaatatccgggaaactgctgagcgtgttcgagattgtcataagggtgccagcggcaacggcttcggtcttctcggtcagagcggcctcttggagttacagctggcgatatctagccatgtgttcgcgtaacctttttaaatcctcgatctctggctgtacccggtccatatgctccattatgcctttgtagggaaggatgaaatcgcggaggatcttttcctcggtatcagctcggcacagttggctttgcacggctggcaattggctctgaggttcaggaatgtccggtgaagagaacggagcggaagagctgacgctgatcgcgtcgccaggttggaaacccgagagagatcctctcggaagaaaaaaaactctggatgaaaccaggacgtgctaccataaatgtggcaagtaagcttggtggggaagatgatgatattatgaaccccttgttgggggtgctaactagctaactatgactaagctgtgacaatatgccgggtctcaaaaaatctcggcctccggctgagaaaaaaaggaaatttcaataaaaaataagaataaaaaatgataagaaaacgaaaaacgccgtcagttgtcgcaggcccggggcggagtatagatgtccgagggcgtgaattcacgcccggggtcgtacggtggcccctcggtggccacttcgagaggagcttcgcagtggttgccacgttctttatcgcctagtagtaacgggctctctagttgggcttggttgttaggagcagcgctttattaaagttggcaggggcggtggaacaggttttcccagcgtctgatggctcggcgctgaatatccgggaaactgctgagcgtgttcgagattgtcataagggtgccagcggcaacggcttcggtcttctcggtcagagcggcctcttggagttacagctggcgatatctagccatgtgttcgcgtaacctttttaaatcctcgatctctggctgtacccggtccatatgctccattatgcctttatagggaaggatgaaatcgcggaggatcttttcctcggtatcagctcggcacagttggctttgcacggctggcaattggctctgaggtttaggaatgtccggtaaagagaacggagcggaagagctgacgctgatcgtgtcgccaggttggtcctgcgtggtgggctggtattcttgctgagtaccgtgactagactaagttggacgatttgtattctggtatgagcgttgaactgggtctatgatctttatctttttcaggtccatttgggagaaagtaaaagacagtacttcagccgagcataaaggagaccacgtggagaattcccagaaaaaaccataggagggtcttagtccttgtaggagtatagcgacgtggtagtgattgtctgagccgatgtccagtatctttgagttcgtttcagctttctagagtatggtatactgaccgtggtggttatgtaattggtataccacagaacgggggtacggaaatttggcttgttctttagcgtggtgggcttggaataccgctgctgggtcagtaactgtatcctctgcgaaaggataacctaggacgataggtccgattgtgaaaactgggttttcgattttaagctttaaatctgccttcgggactattaggtagctgtattttgcggttgcacgaaggctaacgaatgtatagtaacgtttccagattggcgtgtatgggagaccatagaagtcgatttatgggccggggtcctgtggtatcctactagcatgtggtttaccgttggtgtcccagacggtacggaactcggcgcgctttttctgagatagttcctttatcgctgtataaataagctcgttgcttagtagaacgttgcggtcgttaggtagtactagccttccttttgggtcgcgcttgtatctcatatataagggcaaccgagcgatatcttgtggagatagtctactgcctgtgataactgggacccagtcactggtctagattggcctatccagttctagtttagtacgagcggtatcacgagattgtgtcatgtaggaatcgtcgaatgcgtatcccggaaggcaaagtatatcagtcgctccctgtgatggaccaaggtacgggagtgcctttctttttggtataatgagtctggtgtgtaagaaagagaatggttaatgtgaaaaaagaagtaatggaggtaggaaaaatggaacaggtacgttaagcagcaagtaatagttgaatgagagttagaaactcaaattggagtaaaagtaggagttggaagtaagagtcaagtgatgtgaggtagtgagaatggatagtaataaaagtaaaaggaaagtaaaaataaagcgaggaaaatgtggtacttaggagctcgctgggggtacgccctgacgctcctcgaagtctttgatagccttgttacatccgatgcagtcctcttcccgcacctaatagtcgtccctagctgattggcctttctagcggattagatacttagtgatttgatgcctagtactgttgtgacggggtcgaccaggcgcgttgacgacgcgcttggtaagaatgcggtcgacctcgtagacgatatctttggggaaacgctcgtctgtagtcgggtggtgttcgtcatctggttggcgctcccaggggtcgtcaccgtctggggcgggttctaggtatatgatactgatgactgggtggattcttgactcagttggaatatttaaacgataagcaagcttcctgacgcgttcgagtacttcgaaacgcccgatgtaacgctgtcgtagtcgccttggtaaaacttggttcaacggtgtgtcgtatccgtgtcccagcttaagatagactttgtcaccgatattgaaaaaaatctgcctgtgatagcggttgtattggcgttttatacgcatggcagcctaagcggcagaatgctcggcatctgtacgcgcggcgatgtcgggagctgtggcttggtgtaaaagcgactaagggtggcgtagttcgatactgtataagagtttgtaaggtgagtgacctgtcgttatactgactgagctgtttagcgcagcttggagggcgggtaataggtttggctaatcttcgtcggggtgagtggcgattgtgtgccgtatagtaacttcggctgtctggttagtatgttctgactgactgtcagtttgtgggtgataggtggtagtaaaaaacaacttggtgtagatgaggtcgaaaagtgctttccagaggccctgtgtgaacttagggttgcgatcgctgataatcactgtaggaatcccctaattggctgtctaccagaaagagagagtacccagcgcctaatcttcactgtcccagtctatacagccaggtattattcccatcaacttggtgaacttgtcggtcatagtcatggctgtgttatatctgtcggtcgaaatgggtatcgcgacgattagatctaaagtaatagtgtgaaagggtatcggcagggcgatgatcggttggagagaaccgtacgggcgataacggcggatcctgtactctaaatagatagggtaatgtttaatgtactgctttaggagcttggcgcctttgtagaatgtgataccgcgaagcttatgctaagctctgtcgaaaccctggtacatctgctcgtcatgaaccaagttgaaaatttcctgagtcatggattggggcagatacagactctcctcactgttagaatttgtgaaaatgatcaagctattttctaggtggtagggtaacttcttaacttggggatcctgttgggcgtcaacgctttctagagtgtcgattagggctgaccagcgagtgtctgactggtatcctcgtaagatgcgatccttagtgtcgtcgcttagctggagcaccgatgctgtaaggaggtacgctgtgggttggtctactgtaggttgtttaaatatatacggcgctgggatatcctcgagattgtcttgtgtgccggggactgacgggtccgtatatagtaggcgggaaagagtgtcagcgatcttattagtttttcctggtctatggaagatgtgtaggcgaaactgttagatgaactgggacgcacggactaggtgaagattttagcgttctaaagaaatagaactcaagtttgttgttttagcaatacctatagtgctactatggtcggtgtataccacagccggaaggttgctaggacaggcctctaccaagtggcgtaccttgcggagggtctagtagagggcggaaacctcgagcttagtgggctagtaattcttctctgcgtctataagaagtcggctgaggaatatgatcggctggatctctgtagcagggggtggttttgaaatgtccttatgagtgaacgttgtctttgtatgatagattgtggcactgtgccctgtttcctttgaaccgtcggtatcgatatagagctggtgtgtgggatcatggtgtgctagccatttaggttcgtggaactcggcctggagtagacgaaaactcttgagctcagcttgggagggtttattgagaatggcttgtgcgctctacgctcggcgctgggggcctttgatcgggctccctttcagtaagtttgtcttgtggacttggagtggttccgatttctgtgtgtagcttttgatataatggcgaagatcacccgtcattctaaggtatgtttctagctgcttacatgtgcgcggaaaaaccagtgaggttattgcctttaccttctcggcggttgttaacatgcctacggagttaatgtccttgcctagtagggtcaaacttggaaacctaatacgcgctttcttcgggtccagagtgatattgaattcgtctagttttgcgaatagtaggtggagtttagcaatatgttcgttaagtgtatcgccgaccgcgaagatattatcgatgtaggttcgacactattctcgaaacgcgcggagtatattgtctatctagcgttgtatataggcgatggagtttgaattgcctatggtaacgacgtggagaacttcttaactgtggtgcgatatgacagcttagtggctataatagtcggggtggatgtgctattgatagaagaattttgccgtgtctacgattgtgatgaaacgcttgccttttgctaaagcaataatctcgtcttgtcctggcaatgggtataggtctggaactaagttcttatttgtcgggcggttgtcgaccatggcgcgaccgacccgttggagcttggcgttacctttgtcgtctatacgagtgacccatttctatataataaaaatagggttcacgccctaggcttggtatttagtaaacgatatctttccttaagcatatagagtatcgaatgtattgtcgatgacttgttggctttctctcgcctatctgtagacttgtgaacgctgtggctttgaaccagggactattgggagtcttatccattcgtcttataggatatctataacactggggttagaccaaatattatattgcttataaatatcgcggagtactgcagctgttttaggcgtcccatagattataatactattaggtagtactgtttctagtggatgtcccggccgagcgtaggctgtagatattggcaggaccttctgtatgtccggtgtgaaaatagtatcaggaagtctattaggaagtctatctggcagccggggcaagttgttaatagcggccagataggcagtgacagagtcgtgaacgtctcgattaatcaatggggggcggggctcgaccgcttggggctgcgatgccagaggcgttacttcggtagaaacttggtaggcggatgtgaagtctggctctaaaagttggcttatacgatccttcttcctaatgacttgtgttcggtcggtgttgttaacggcgtgtatatatgtgaaaccggcgtcaaccatctgtgccggaatcttaaacttgctgttgcctggcttgaaaacgaagtcacgatccttcggtaaaatcgacttcacgataatggggatctgtgccgcctggcgtggggggacctcgattttagaagaagtgtagaccggtcttttactcatgtggtgtggttttgcgcagagggcaataggaaaagtcaagttttcgcaggacttaatgatcgcctgggaacgtgggaaatcgagtataaacccttctggtcctagaacatccataccgataagaagctgggcacagaggtccttgacgatgtgggcctcgattcgtagctctgcggctatatctttgttcaggaagtaaacttgaatcacgatgtagcggtcggataggtgttgggaaccgatcctacttataggaatcgggctgatagggtactgggggtattggagtgatgccgctagctttgaatcgattaaagtcataacacatccggagtcgaggcagcaagtgtttagcttgctggggcttccaagtccgactgtggccgttgtatatcgccaggatcgaaatgtatagccggggacgtggtcggtctgtctggccgagtggatgatgcgataagcgggattcgcgaaattagcgatagctttagctggtatagcggcagcagcttgaggcttacagccgttaagatgctgatacagcttggtgttcgacttgaaaacctgtaaataggataaataagtgactgagtactcgctgtcgactgtatatagctgggcctatgccggcggatcggcctgggcttgaaaaccggattggtggtcgttatcctgtaggccggtagggtcagcgaaattcgcaccgtatgggtccttgtcggtgtaaaagtcgtcctcgaaatcctgttaatcgttgtcgttaactaggacgtcgtcctgatactcctccaggctattgttattagcttgggagtagtcatttgactgatgatagtcagtatctgtatccatgtggtatgcccgctgaggtttattccaaacagtacgctgggagttcccagagccgttacggccggactattggcggccaggattgttccaggtctgctgagcttgaactccctgctatagacgttgttgtctctgaaaggtttgggggccttggttgctttgtgctgggttctggggctgatactgatgggactgatattgggctcctgtggcttggtatgggcgctgaggagtctgctgagcctggccacggggcgctggagcctgttgttgtctatatccggcctggctttggggtagaccttgatagtcttgggctggcgagcggttgtagccgtacgggcgctgagggtagccttggcgctggtcttgtcggtgatatggggccgaattgtcctgtcgcggcctattgtttctaaacctggtagtcaactgactctggcgcttggttgccatatctttctagtcttgatagtggtggtcaaggctgttcatgaaagtgactaacgaggtagtctcagttggctctgggatgtcgcgacgaagcgtaggctctaggttctggcgaattcgtaataactggtcgagaacatctgtcgtacccgtagctttgcataggcgtaacataccctgcgcatattctcttggggtgcggcctcggcgtacgtcatcccattcgtatgtgtgcttgtcaagctggagaagggcctcggtacggttgggtctgaaacgccgcgtcatcatggaaaaccatccatcctggagcggaacctggttcataaggcgtttttcgtccgtggtcagctcctgcgaataccatcggagcgcgtcacctcgtaggcagctatggatgttcgctcggacaacagcttccgacttcaggagtattaggtctgtcatacgatctacaaacgtatgcacgtcggagtagacgcaaagattttggactgtgtccattccatccttaaaactcttcgaaggatcgaaaacgccaatttcggacgctttccacgaggtatcggtagtagccaattggcctggggaaccttgctcgccctggggaccttggttaccttgaggcccgcgaagagcgttggcattgttccgaaggcttgtctgtacggctttctcgataagctccgtaaactgtgccatatcgaaaccgggcaacggtggggaagcagccggagttggcgtgtcgcctgtgtggccaggnnnnnnnnnnnnnnnnnnnnnnnnnnnnnnnnnnnnnnnnnnnnnnnnnnnnnnnnnnnnnnnnnnnnnnnnnnnnnnnnnnnnnnnnnnnnnnnnnnnnnnnnnnnnnnnnnnnnnnnnnnnnnnnnnnnnnnnnnnnnnnnnnnnnnnnnnnnnnnnnnnnnnnnnnnnnnnnnnnnnnnnnnnnnnnnnnnnnnnnnnnnnnnnnnnnnnnnnnnnnnnnnnnnnnnnnnnnnnnnnnnnnnnnnnnnnnnnnnnnnnnnnnnnnnnnnnnnnnnnnnnnnnnnnnnnnnnnnnnnnnnnnnnnnnnnnnnnnnnnnnnnnnnnnnnnnnnnnnnnnnnnnnnnnnnnnnnnnnnnnnnnnnnnnnnnnnnnnnnnnnnnnnnnnnnnnnnnnnnnnnnnnnnnnnnnnnnnnnnnnnnnnnnnnnnnnnnnnnnnnnnnnnnnnnnnnnnnnnnnnnnnnnnnnnnnnnnnnnnnnnnnnnnnnnnnnnnnnnnnnnnnnnnnnnnnnnnnnnnnnnnnnnnnnnnnnnnnnnnnnnnnnnnnnnnnnnnnnnnnnnnnnnnnnnnnnnnnnnnnnnnnnnnnnnnnnnnnnnnnnnnnnnnnnnnnnnnnnnnnnnnnnnnnnnnnnnnnnnnnnnnnnnnnnnnnnnnnnnnnnnnnnnnnnnnnnnnnnnnnnnnnnnnnnnnnnnnnnnnnnnnnnnnnnnnnnnnnnnnnnnnnnnnnnnnnnnnnnnnnnnnnnnnnnnnnnnnnnnnnnnnnnnnnnnnnnnnnnnnnnnnnnnnnnnnnnnnnnnnnnnnnnnnnnnnnnnnnnnnnnnnnnnnnnnnnnnnnnnnnnnnnnnnnnnnnnnnnnnnnnnnnnnnnnnnnnnnnnnnnnnnnnnnnnnnnnnnnnnnnnnnnnnnnnnnnnnnnnnnnnnnnnnnnnnnnnnnnnnnnnnnnnnnnnnnnnnnnnnnnnnnnnnnnnnnnnnnnnnnnnnnnnnnnnnnnnnnnnnnnnnnnnnnnnnnnnnnnnnnnnnnnnnnnnnnnnnnnnnnnnnnnnnnnnnnnnnnnnnnnnnnnnnnnnnnnnnnnnnnnnnnnnnnnnnnnnnnnnnnnnnnnnnnnnnnnnnnnnnnnnnnnnnnnnnnnnnnnnnnnnnnnnnnnnnnnnnnnnnnnnnnnnnnnnnnnnnnnnnnnnnnnnnnnnnnnnnnnnnnnnnnnnnnnnnnnnnnnnnnnnnnnnnnnnnnnnnnnnnnnnnnnnnnnnnnnnnnnnnnnnnnnnnnnnnnnnnnnnnnnnnnnnnnnnnnnnnnnnnnnnnnnnnnnnnnnnnnnnnnnnnnnnnnnnnnnnnnnnnnnnnnnnnnnnnnnnnnnnnnnnnnnnnnnnnnnnnnnnnnnnnnnnnnnnnnnnnnnnnnnnnnnnnnnnnnnnnnnnnnnnnnnnnnnnnnnnnnnnnnnnnnnnnnnnnnnnnnnnnnnnnnnnnnnnnnnnnnnnnnnnnnnnnnnnnnnnnnnnnnnnnnnnnnnnnnnnnnnnnnnnnnnnnnnnnnnnnnnnnnnnnnnnnnnnnnnnnnnnnnnnnnnnnnnnnnnnnnnnnnnnnnnnnnnnnnnnnnnnnnnnnnnnnnnnnnnnnnnnnnnnnnnnnnnnnnnnnnnnnnnnnnnnnnnnnnnnnnnnnnnnnnnnnnnnnnnnnnnnnnnnnnnnnnnnnnnnnnnnnnnnnnnnnnnnnnnnnnnnnnnnnnnnnnnnnnnnnnnnnnnnnnnnnnnnnnnnnnnnnnnnnnnnnnnnnnnnnnnnnnnnnnnnnnnnnnnnnnnnnnnnnnnnnnnnnnnnnnnnnnnnnnnnnnnnnnnnnnnnnnnnnnnnnnnnnnnnnnnnnnnnnnnnnnnnnnnnnnnnnnnnnnnnnnnnnnnnnnnnnnnnnnnnnnnnnnnnnnnnnnnnnnnnnnnnnnnnnnnnnnnnnnnnnnnnnnnnnnnnnnnnnnnnnnnnnnnnnnnnnnnnnnnnnnnnnnnnnnnnnnnnnnnnnnnnnnnnnnnnnnnnnnnnnnnnnnnnnnnnnnnnnnnnnnnnnnnnnnnnnnnnnnnnnnnnnnnnnnnnnnnnnnnnnnnnnnnnnnnnnnnnnnnnnnnnnnnnnnnnnnnnnnnnnnnnnnnnnnnnnnnnnnnnnnnnnnnnnnnnnnnnnnnnnnnnnnnnnnnnnnnnnnnnnnnnnnnnnnnnnnnnnnnnnnnnnnnnnnnnnnnnnnnnnnnnnnnnnnnnnnnnnnnnnnnnnnnnnnnnnnnnnnnnnnnnnnnnnnnnnnnnnnnnnnnnnnnnnnnnnnnnnnnnnnnnnnnnnnnnnnnnnnnnnnnnnnnnnnnnnnnnnnnnnnnnnnnnnnnnnnnnnnnnnnnnnnnnnnnnnnnnnnnnnnnnnnnnnnnnnnnnnnnnnnnnnnnnnnnnnnnnnnnnnnnnnnnnnnnnnnnnnnnnnnnnnnnnnnnnnnnnnnnnnnnnnnnnnnnnnnnnnnnnnnnnnnnnnnnnnnnnnnnnnnnnnnnnnnnnnnnnnnnnnnnnnnnnnnnnnnnnnnnnnnnnnnnnnnnnnnnnnnnnnnnnnnnnnnnnnnnnnnnnnnnnnnnnnnnnnnnnnnnnnnnnnnnnnnnnnnnnnnnnnnnnnnnnnnnnnnnnnnnnnnnnnnnnnnnnnnnnnnnnnnnnnnnnnnnnnnnnnnnnnnnnnnnnnnnnnnnnnnnnnnnnnnnnnnnnnnnnnnnnnnnnnnnnnnnnnnnnnnnnnnnnnnnnnnnnnnnnnnnnnnnnnnnnnnnnnnnnnnnnnnnnnnnnnnnnnnnnnnnnnnnnnnnnnnnnnnnnnnnnnnnnnnnnnnnnnnnnnnnnnnnnnnnnnnnnnnnnnnnnnnnnnnnnnnnnnnnnnnnnnnnnnnnnnnnnnnnnnnnnnnnnnnnnnnnnnnnnnnnnnnnnnnnnnnnnnnnnnnnnnnnnnnnnnnnnnnnnnnnnnnnnnnnnnnnnnnnnnnnnnnnnnnnnnnnnnnnnnnnnnnnnnnnnnnnnnnnnnnnnnnnnnnnnnnnnnnnnnnnnnnnnnnnnnnnnnnnnnnnnnnnnnnnnnnnnnnnnnnnnnnnnnnnnnnnnnnnnnnnnnnnnnnnnnnnnnnnnnnnnnnnnnnnnnnnnnnnnnnnnnnnnnnnnnnnnnnnnnnnnnnnnnnnnnnnnnnnnnnnnnnnnnnnnnnnnnnnnnnnnnnnnnnnnnnnnnnnnnnnnnnnnnnnnnnnnnnnnnnnnnnnnnnnnnnnnnnnnnnnnnnnnnnnnnnnnnnnnnnnnnnnnnnnnnnnnnnnnnnnnnnnnnnnnnnnnnnnnnnnnnnnnnnnnnnnnnnnnnnnnnnnnnnnnnnnnnnnnnnnnnnnnnnnnnnnnnnnnnnnnnnnnnnnnnnnnnnnnnnnnnnnnnnnnnnnnnnnnnnnnnnnnnnnnnnnnnnnnnnnnnnnnnnnnnnnnnnnnnnnnnnnnnnnnnnnnnnnnnnnnnnnnnnnnnnnnnnnnnnnnnnnnnnnnnnnnnnnnnnnnnnnnnnnnnnnnnnnnnnnnnnnnnnnnnnnnnnnnnnnnnnnnnnnnnnnnnnnnnnnnnnnnnnnnnnnnnnnnnnnnnnnnnnnnnnnnnnnnnnnnnnnnnnnnnnnnnnnnnnnnnnnnnnnnnnnnnnnnnnnnnnnnnnnnnnnnnnnnnnnnnnnnnnnnnnnnnnnnnnnnnnnnnnnnnnnnnnnnnnnnnnnnnnnnnnnnnnnnnnnnnnnnnnnnnnnnnnnnnnnnnnnnnnnnnnnnnnnnnnnnnnnnnnnnnnnnnnnnnnnnnnnnnnnnnnnnnnnnnnnnnnnnnnnnnnnnnnnnnnnnnnnnnnnnnnnnnnnnnnnnnnnnnnnnnnnnnnnnnnnnnnnnnnnnnnnnnnnnnnnnnnnnnnnnnnnnnnnnnnnnnnnnnnnnnnnnnnnnnnnnnnnnnnnnnnnnnnnnnnnnnnnnnnnnnnnnnnnnnnnnnnnnnnnnnnnnnnnnnnnnnnnnnnnnnnnnnnnnnnnnnnnnnnnnnnnnnnnnnnnnnnnnnnnnnnnnnnnnnnnnnnnnnnnnnnnnnnnnnnnnnnnnnnnnnnnnnnnnnnnnnnnnnnnnnnnnnngctgggagttcccggagccgttacggccggactattggcggccaggattgttccaggtctgctgagcttgaactccctgctatagacgttgttgtctctgaaaggtttgggggccttggttgctttgtgctgggttctggggctgatactgacgggactgatattgggctcctgtggcttggtacgggcgctgaggagtctgctgagcctggccatggggcgctggagcctgttgttgtctatatccggcctggctttggggtagaccttgatagtcttgggctggcgagcggttgtagccgtacgggcgctgagggtagccttggcgctggtcttgtcggtgatatggggccgaattgtcctattgcggcctattgtttctaaacctggtagtcaactgactctagcgcttggttgctatatctttctagtcttgatagtggtggttaaggctgtttatgaaagtgactaacgaggtagtctcagttggctctgggatgttgcgacgaagcgtaggctctaggttctggcgaattcgtaataactggtcgagaatatctgttatacccgtagctttgcataggcgtaacataccctgtgtatattctcttggggtgcggcctcggtgtacgtcatcctattcgtatatgtgcttgttaagctggagaagggcctcggtacggttgggtctaaaacaccgcgttatcatagaaaaccatccatcctggagcggaatctggttcataaggcgtttttcgtctgtggttagctcctgcgaataccatcggagcgcgttacctcgtaggcagctatggatgttcgcttggacaatagcttccgacttcaggagtattaggtctgttatacgatctacaaacgtatgtatgtcggagtagacgcaaagattttggactgtatccattccatccttaaaactcttcgaaggatcgaaaacgctaatttcggatgctttccatgaggtatcggtagtagttaattaacctggggaaccttgctcgccctggggaccttggttaccttgaggcccgcgaagagtgttggcattgttccgaaggcttgtctgtatggctttcttgataagctccgtaaactgtgctatatcgaaaccgggcaacggtggggaagcagccggagttggcgtgttgcctgtgtggctgggaccctgatttccgttgttacggctgggacccggacctctgttatttgccattttttgcgggaggtcagagagtttggcttcccgtagtaggctcgatagacctgctatggggctggcctcgctgttgtaaaaacgtgaagttaatcgtactcttgactgtaccgggggtcgttctggggtcaggtgtttaatgccggccttgtgagagtggaggtctgcttggtcgtcttcggcttgttcggttcccggagactagacttccgcctggtcgtcttctgcttgttagtcttccggagactggacttccgcttggtcgacttcggcttgttgagactggacttccgcttggttgacttcggcttgttggtcttccgaagactggacttctgcttggtcgccccgtagaaggtctgtgtggctgtccttagcctgtggtgcggaattttcgtccttggttcggaaaaacttgctgtcgtaactgtctggccggggactgaaacgaggctgccgttgtatagtagcgggcctgtgcgtgtagcgtatgatagcagtagcttgggcagtcggtcggtccgaaatgggcatcgaagactggggtgtagaaaggtgtatcacagcagcaggttgggcagtcggttggtccgatacagacgtcgaagattgaggtatggaagccggtgaactgggaggcttgctcgtagttcgcttaggtcggggtctcccgagcggacacgtaggctcgctcgacagaggggttataggacttggaacggcgaggtgagatgtcagacggaggaaatccttgacggccttgttgagtatagacctgtcgatgggccaggaaggtggaaatggatcctctgaagatggaaggatgacggaagtggatggcgaggttgagggattggcgggcccggcagggggagggggcggggacgaggctgccgtcgtgtagtagcgggcctgtgcgcgtagcgtatgacagcagtagcttgggcagtcggtcggtccgaaatgggcgtcgaagactggggtgtggaaaggtgtatcacagcagcaggttgggcagtcggttggtccgatacagacgtcgaagattgaggtatggaagccggtgaactgggaggcttgctcgtagttcgcttaggtcggggtctcccgagcggacacgcaggctcgctcgacagaggggttataggacttggaacggcgaggtgagacgtcagacggaggaaatccttgacggccttgttgagtatagacctgtcgatgggccaggaaggtggaaatggatcctctgaagatggaaggatgacggaagtagatggcgaggttgagggattggcgggcccggcaggtgaaggggttaggataatgataacgcgggaaagtgtatctgcgtcgaaatcacctgactaggggcgtgcctcctagcgataattgtcgaactggattgcaagctgggtggcccgacgagtacgcttatccatggattgttatagtagcggctcggcactgtgatcgacagccttaccgtagcggcttggcactgtgatcgacagccttaccgtagcggcttggcactgtgatcgacagcgtggtcgaccgccgatcgtgccaggcttggtgacctctgaccttggcatataggggaacccctgaggtggtcgaacttgttaaaacaaacccgagagagatcctctcggaagaaaaaaaactctggatgaaaccaggacgtgctaccataaatgtggcaagtaagcttggtggggaagatgatgatattatgaaccccttgttgggggtgctaactagctaactatgactaagctgtgacatcgacctcgtcattcaagcccacactcacttctacgagcgcaacgggcccttggacaatgaagtcattgatcctgcaggtttgaataatcccaaatccccttggtatattactagcgccgcccctggccactatgacggattggacagctttgatacccccttgaagccttatgctgtgtatggagaggatactgtctacgaatggagcaagatcaccttccacaactgcactcatatgactcatgaatttgtggggacatacggattagggcgttcagccttgaattagatattctcatgtgtggaccagcactttcggaatgcgtttgtgaattgaaataaatttgccgcttgcgagttgcaaaatatgaacccattagtacgccatggatagatgtaaacaattatgttcaagattaattaatacccttgtaggctagactatatgccgaccccgaaggaggcgttttacctggtccccggccgacgacatgggctgagtgagttaaccgcagccggtaacagtgataccagtctcttcttgttcaaacacccagtgagactacgccaagaagacaaacgagaggaaatgcctagattgctgcaaccagcactttgctatggcaacgtaagagaaaaaaggcacaatggacttggccgcgtggcaggattggattttctgaatcgccattgcttggaaatccagaattctttttttctattttcctttataggcaggggagcaattgtctgtctccatacacctcacctgaataggcaatagactaggtcaggggcctagttcaaaggggattgtgcttggaaataccccggccatgattggctggaagttagccctaactcaggcagaaaacaatgtattaggaatatccagcaagcaaagagagtgtgcaaaaatatgtatatatacgcatattttgtgctattgccttgcgagatgcgacaaattctcttgatcttcacaaagaaataatcactcgtcatggctagcactatcaacatggcaagtgagcatgtggtcgaacaactaaatcaaaaccatgccgccaacgaaaagcatttcgattcaggggaggtcatgcgagacatgattattggtctggctgatggcatgactgtgccgtttgctctgacggctggtctatctaccctaggctcttccaagctggtcatcctcggtggtcttgctgaactcttcagtgggtcgatctcaatgggcttaggggcttatcttgctgctgtaactgatcgagaccattatgcgagcgaggaaaaacgagagcgtgaagaggttgtctccaagccaaatgcagaaaaggaggaaatccatgagattctctccaattacgggatttctcgagaggcaagccagaatgttgtggattgcctgtctgagaaccatgaaaactggatccgggtatgtcagcatcctagataagaatcaatggtgatattggctaacgtcgggacctagttcatgatggactttgagctgaaaatggaggagccgaacgtatccagagcgtggatttcggcagcaacgatggggatctcttatttcatcggtatggatatctgctctgctattctttcctccttccacgacttatctgaggacctgactaacacgcgagtacttgtttctaggcggcctccttcccatgataccctacttcgttatgcacaaggttgtcgacgcattgttcgtatccatcgggatcacaattgtgattctggtcggcttcggcttcatcaaaaattatgttgtgatcaagacgaaacaagcaggactgtacggagcggcacaggccctgttagttggcaccatcgccgctggaaccagttacgggattgtgtatggcatcgatcatagcaacctttatacatagcgtgttgcgcttccccgggtcaaacacagtttgttatctatgggggaaattgcatatggaactttataaatgagggggctactgaaaaaacgcatagttatagcccgcctggaagatttagacatttttgaaaatttggaaatcctatgtgacgaaagacagcatgaacatttctcaaagccactaaggctcttcgatctatcaccatctcaaataaaatatttcatgatttttgcaaagcccggttcttgcattctcacacaatctctatgatcacataccatgcctttcaatttacgttcaaacgctatatgctgatctcatataatgactcttctcatagtgagcaagatttgcacccaagaaccgaacgccctcacaccggtaaatcttcgaagacgctcagaaaccatcagtatattgtagtggtctccgctgagccagtcagacatgatgggcctgaaatctgcatgagatcaactgaaattgatgaaagcactgataaagactcgtggtttttcttccgtattccaattcgccctgaacagcaccgcaataagacctacaccgtgatcaccacagcgatagaattgttgatcaccacagatcacgatgcatattaccaagtgagcctgatatcgccatttcagaattgcaaagaattcgatgatatgtccaatgtcctatgaacaataccaaattttgacttccccattactgcagaacaggaaatttcccaggttctggtcccaaaactcagctccgtgctcatatagagtcttaagggccttttcaagttgagtctccaacgtcttctcgtggacatcagatttagagcgttgacgaagagtgattccatcaatttccgagaggataagcgccggacacacattgaaagaaccttgcccaaaaagagttggaattaaggtccctcgaagcattttcaatctatcgtatgcatgtatctcattccggaactcgtcatcccatccatccttcctttacttgacaatgactgattttagaagaccaagaccaggctggtcaagttacaagcggcataaagtcggacgacagtttttcagcaccgtaaccgaaatcacagttatgggcctgtcatctagatagaccgtctactgctgaatgagcttggtaaagtcttgcattaatgtctagaaatcggatctcacctgagaaggatgcacttcttgaacaatataatccatgacgtgaagggcgaatagtgcaggtgggagaatctaagactagaaaagttagaggaagggagtatgatatggcagagctagaggaagcaagggttccagggagggaagtcaaaaagcaaaaaaaaaaactagacctacatcaggctttgtattgagatatggtaactgtatggatatgtacatgggagacatggagctgatagagtagcatacacctgccattgatcatcttttcagcctcggaaaagatggatatctaactcaaatgtcgatttaaccaattcggttgagatgtttccctaaagcttgctatcttgttgtcagttatactcctcgctccctccatccatggatggtggatgttcgaggtaatgagtcagcaaaattccctcccgccgggcgcactaaccgcttgtggaatgtagcctcaattctttccccaagcctgagagatatagctgggaccatttaattgtggcgaaggcgaagaaaaacacagaatttcatcctaacagatttattgagctgagcgcactggagaaaaagtggcagtgttgcctttgatcgcatttgtcccagcccacccgagaggaaaccgaaaccaactgccagcaacatcaattggactcaaagctggcgcgaatgacattacgaccacaatattcacaagtctgatacaaaaccaatgagtatggatgatcagcgggggtccagaactgcccccttctacgcagtgccatcccgtcgcctcgtcagcgtcgagcaccctgccgtgatccgcaatgtcgacaaggcgatcgagaccttacaaggcgatgccggaataaaaacagtgaggaagcttctccttctggcagaatatagaacgcacactgatattatacagattctcaacccggccacagacggcacactagttaatctggtgttgcggccagaagatgccatggctcgatcggtgcagtcaacgagcatccaatcaaacaatgtcctgctcaaaatcacagtccccaagcggacaggacggaagcgcaagagaggctcgaatgagcctttcgcagacgcaccggagtcagaagcaactgacgcaccccggcgacggaccgctaaggatctcctgcgcagtctgagtgataacccctctaagtaccagattgagccggtcgggagggttgaacgaacacatgtgtttcggggtaatttcactgctctgatttaatcatggcgagtatgctaatatctgatatcaggaatacctgatttcgtttactcgactacggcaagttcatttacgaaccggttccgagaccaaattctcccttttgactgtgagtctgcttgccatgaaacccactcgatatgtgactaacaacccacagtcgacaagatgaagcaatttgacatcgacatggccaaaggcgccgccgagaatgcagatctgatcccgccaccatcattcagccacggagacgtccccttccactacatgtaagagccaccccatcgaaagcaccgagctaagaccaccagtccactaactctccctcccagctatcggcaaaacccgacagtaaaacaagcaattggcagctccggcaaactagaaacggtgaacacgcaaaccgccaataaaatcctaacccacctagtcccctacgacatacccaaagtgccatccgagccgcgcgcggacatgcttccaataagcgcactagacgcaggcatgctccggacaatcgcgacactaaacgccctatacgacaaacagcccgcctggacacgtcgcggactacgcaacaacctaacaaccgacgaagaccgtctgaacctccgccatgcaattccatacgtgggctacatcttccgatccgggccatggcgcgacgcgatcatcaagcttggtctcgatccacgcacttcaccaaaataccgacattaccaaacctttatgttccgacttctagcacgggaagcggaggtcgcgcgagacggaggcggcgggcgacgccacaatgtgccacgaccgagcgaccagcgcatgggcgaggacgaagccgccagcgggccatcgacgggccatatctttaccggcaagcagccgtttgcgcaagacggacggatctggatggtgggcgagatcaaggacgcgcagctgcaggctgagctgtacccttctgatgcggggcctgggttcctgcgcagcgagtgcgatattgtgaccgatgggtggtttgggaatggcacgcttgcgaaggtgaagacagttatgcgacataagatccaggcgttgatggaggggcgggagccggttgatgaagattatacgaagattatgcagctccctgcgcatgcgcggtctgaggctgatttcccgttgttcacgcttgatcccgaggttgcgacgcagaaggagattagtcttgctacggaggttcgggcggttatccggggttcgccggtttggaggaatttgtcggctaatgctgggttgattaggagggagatcggggaggggagggggaaggtcaaggggaagcaggctgtgaaggggaagagtgctgacccggaaccggagccggagcctgagaaggtcgatgaggagagtgaaggtgaagaggaagaaattcagaggagggagatgctggctgctcaggttgcggatgctgctgcggcgagagatgccgatgaagctgattatgacgatgaggcggacggggacggtgatggggacgatagtgatgatatggatgaagacgacgacgagtaaagcggctactaaattactggatgattggctatgtctagaacaaatggtactttatgctcaatattgtaatcaaaataatcattttattcgttgttaaaaccgtaggcagactcggagtatattgtgaagcatcagacacaacatagagagtaactcatcaattaggtaggataaagaaagtcaacccgagtggtcgtaatagtgaagcaaaacaaatgcataattcaagccttataccaaaacacccgatacactgaacaccagtgtccaaaaagcgacgaacaccatgacccttcgtatagttatacggcttgagggttttgagtttttgaaatggtacttagtattatgttactttgccagatcgattcgtaagaaaagagtgcatgttaagatctgagtgtacatcgagtggaatatatagaaacatcaaaccaaccggccttgatatcttggtccacttcgtcggtaaattagtagatattaattcttctctacttattcacaatcatacgagcggctgacgacacaaaaaataacgattctaaattcgtgagtggctgcttggtccgttctatgaccaatggcagccagtatgtagccgccagtcccccttcgttcgtgctcacgtgcatatttatcattgcgcctgctgcagctacgttagctggaaaccaagccagaggctctcaggccgagaataggtggtttcatctcaaattatttctcagtcagagtggatctttgcccttgagatgagccatcaaccgctacaattgtgtatttcctccccttctgtcttgagcacgcccaagaggagtaagcttgtcatgacccattgtattaaacatacgatctattcagtggcagatgaggtccatattggattcctaggatgtatgaagacagattatacacctaatgtactcaaaattccgatccatgcttactgaccccaaaaagtaccggtggagcgatgcctatattttattacaattctatgagagtagacatgaaaatctggcagatcaaggccaagaaatttataaagatctcatgctaacgagaacaaaagaaactcagtaaaaacttgaagccatagttctgcagggctgtaccttgaagaaactcggagcggaacaaccaccaccgatatgactgccaaatgcggactagtctttctttcggggtctctgcgatagcccgcgtcctctgttctgctctcgtgaatatcgcgccgcatacaatccccaactttctccccatctccctcagcctctcctcccctgcggggtaattccattcactcattcgctgtccggacttaattcatttcaatggattaggcagttttgttttcccgaaagagtaaatgacttgatggtttctttcgttttaagttctacagtctccgatcttttcgcatatcgaccgagtccacagagcttccgtgacaccacaacacaacatatgagagctcaattcccccccgggaagactgcgcacactccgctctcctcagccggcctcttggcccggccgtcattgctgtttctttccatttagtcgccagcctgtgagaagggtcagatcaaagcgatggagcgaaacatagatatctacgccagcaagctcggcgacgaaaagctaggtatgttgatgaaatctgcacaactagaactgttgtccccttcctgtgctaactaacccgtcgtctcaatagacgtcaaagtccgagccaatgttgctaccgaattacgagacagcattgagcccctatgttcgggcgcaagctatcccatattcttagcgaagctatggccggtattcaaaactattttgaagggggacccggtcttcttcagcatgtcttacgaccaggtgagattattggcacacgcttgcccctagtgaatgttgcgcataacgagctaacaaccttggtcatctattagaaattacgaaattgtatcctcgaaacattacaccgattaccgatgggatccccggacgtggagccgtacgctgtcgatatggtcgatctattgatggaacttgcgcggatcgaaaacgaagacaatgccgtgctatgtatgaagacaatcatggatttggagaggaatcaggccaaagccaccgcacaccgggtgcaggctttcttggagcttatccaggaaatgttccagaccatggagcaggtggttcgggatactttcgacactcctaaccaggccacaccgtcgggaatgccatcgacgcccaatgcaacagcacagaacttccagtctccgcgacccagctcgcctgctacctcagtatcagatctgggacccgatcagcagtcgagcaatgttctcctcaagggcatgcaatctttcaaggtcctcgcagagtgcccgattattgtcgtttcgatcttccagacacaccgcgcatcggtgccggccaacgtcaagctgtttgtgccgcttatcaaaacgatcttactgcttcaagcgaagccacaggaaaaggcccacgccgaagcagcagcccaaggcacaatatttacgggtgtgtgcaaggaaatcaaaaatcgcgctgcatttggggagttcatcacggctcaggtgaaaacgatgagcttcttggcatatcttttgcgtctttatgcccatcagttacaggactttcttccaacgcttccttctgtcgtcgtccgtctccttcaagattgcccgcgagagaagtccggtgcgaggaaggagttgttggtagctattcgtcacatcatcaactttaactatcgtaagatcttcctcgagaagattgatgagcttttagacgagcgcactcttatcggagatggccttactgtctatgagaccatgagaccattggcttacagcatgttggccgatttaatacaccatgttcgtgagcatctgagtcgcgaccagatacggcgatcggttgaagtctacactaaaaacctccacgacgatttccctggcacaagcttccaaacgatgagtgcaaagcttcttttgaacatggcagagaacatctccagactagaggacaagcgtgaggcgcggtatttcctaattatgattttagatgctattggtgacaagttcgcatcgatgaaccaccagttcaaaaacgctgtcaaagtttcaagggcgtacaaagttttccgacaagagaccgagccttgcgccgagaactaccttgctgagaaggaccagccaccagactgggatgagattgatattttctcggcttctcctatcaagacatctagtccacgcgatcgtggaggtgacccagtttcggacaacatcttcctcttccgaaacctgatcaatgggttgaaaaatatcttccggcaattgaaaaattgcaacccagacgatgttcagattgacccgaacagcgttcccattaactggtcagaagtttcgtacggttacaatgcagaggaagttagtgtgatcaagaagcttttccacgaaggagctcgtgtgttccgctactatggggtggatcagtctccccctgagatgaactacgcatctccgtttgacttccttgctagccagtacactgccccaatgtcgcgcgaagaaaaggagcttcttgaaagtttcggcactgtttttcactgcattgataccgcgaccttccacgaagttttccattccgagatcccgtacttacacgagctcatgtttgaacatggggctctccttcacttgccccagttcttcctggctagcgaggccacttctcccgcattctctggcatggtgctgcagtatctcatggaacgcatcgatgaggttggaacttcagacatgacgaaggcaaagatacttctgaggatgtttaagctttccttcatggccgtgaccttgttctccgtgcagaatgagcaggtcctccacccgcatgtgacgaaaatcgtaaccaagtgcattgagctttcagtcacagccgaggaacctatgaactacttccttcttctgaggtctctctttcgaagcattggtggaggacgattcgagctcctgtacaaagagatcctcccacttctagaaatgcttcttgaaacgttcaacaacctgttacttgctgcccggaagcctcaagaacgggatctgtacgtggaactcaccctcaccgttcctgcgcgactcagccacctcctccctcatctcagctatttaatgcgcccaatcgtggtcgccttgcgtgccgactctgatcttgttggtcagggtttgcgcactcttgaactctgcgtggacaacctcacggcagactaccttgatccgatcatgggcccaataatggacgagctgatgactgcactctgggatcacctgcgcccatctccttacaaccacttccacgcacacaccactatgcgcatcctgggaaaacttggcgggcggaatcggaagttcctcaaccacccgccagaattgtcgttccagcagtattctgatgataacccaagcttcgatatcaggctgatcggtcccaacgagaagcggccttttcctgtagatatcggtattgatctcgctgcggggaaactcatggaggttcctaagacagactccgggaaagcttcagacatttactacaagcagcaggcctaccgcatgctcagctcctatctcaagctccaaatcggttacgacaacatccccgaagacttgacaatcttgatcagactccatgccaatgatctgttcgaaaataagacaggtgctatggcagatattcttgacaagtcggaaagatcggcctctattccaaagaagattgcgcaggaagcaacagtaaagaaacttatcaaggcttgcatctttgccaccactatccccgagctcgaaccagccgcttcagcatttgtggcggatgtgtgcaagcacttcgctcttgtagaggtcggccgtgctctggctcaaatccgacacagtcgcaaagcctttgacgtcgcaaacggggaaggccctgtgtacctcgactctaggattctggctgaagctttagttgagtgtttatcatccgatgaggtccacgtccgagaagcagctgagcaggcaatggtggttgtgaaggatgccgcaggcgtcatcttcggatcgcccgagaaagcagccaagctcccattcttcgtgcatctgggccgcgtcttctgccacagctgctacagtgaagagtggttcaccaaggccggtggcagtctgggaattagcctgctctcaaccaagctggacttgggagatacatggctttatgagcgacatgtcgagttttgtcgtgctttgatgtatgttgtcaaggacacacctgcggatctccctgctgctacgaggcttcagtcacaagaaacaatgactttgatgctgcgaagatgcggcaaactcatccccaaagaagatttgaaaaacgagaagagccgcttgtatgctctgtgtggcttgttcgtgtttgaactcgcacacatgaataaacatgtccgggagactgctcgtcgttgcttcaccacattgaaggaggtccttggatgtgaggtgcatgagcttattttccccgttagagatcgtctcttacagtcgatcttcaacaaacctttgcgtgctctgcctttcccaacacagatcggtttcattgatgccatcacgtactgcctcggccttcacaacgacatcgtcaccttcaacgaaccgctgaaccgcttgatgctggaatctctcgccctcgctgatgccgatgatgaatctctagcatctaagccaaacgaattcaagactgcagatatgattgtgaacctgcgtgttgcttgtcttcgccttctatctatggcaatgagcttctccgagtttgccaataccccgcagaacacgagcagggctcggataatttctgtttttttcaagtcactatactcaaagtcacaagaggtgattgaagccgcaaacgcgggtctccgtgatgttctcacccagaccaacaagcttcctaaggatctgttgcagaacggactgcgccctatcctcatgaacctccaggatcccaagcgcctcagtgttgctggtttggatggtcttgctcgtcttttgacactcctgactaactatttcaaagtcgaaatcggcgcgcgtctgcttgaccatatgaaagtcattgcggatgatgccgtattgcagaaggtgtctttcagcctagttgagcaaaacccagcgatgaaaatagtggctgccatcttcaatattttccatctccttccaccggccgccacttccttcatggaacatcttgtcaacaaggtcttagatctcgaactgaagcttagaagaacgtcgcacagtccattccgcaagccgcttgtgaagtatctcaatcgctaccccaaagagagtctcgcattcttctttgcgcgcttcaaggatgagcggtttggacgattcttcggacaaatcttggcggatcccgagagtgaaggactgcgaaacgcgatcgtcgctgacacggatggcttttccgctgccgcctttggtcaggatactggtgatggcaagaacactgctgctatcaacggagtctatgtcgcacattctctttgttcctacagttcaaccaagcgctggttggtctcacatgcagagatgagaaacaagctcctggcttccggtagagatctggagaggaagcttcgtggtgatagtctgccggctgatgagcgactccgagtggagcaagccgaagaccaattgatggatatctttaccatgtacttggcagaggccacccacgatctggacttcctgtttgaagtgattgacgggctctccgccgatgagttgaaacgcacgcttgcgcttcctaagttcatctataagagcatcatcaccaatgagtccatcgattaccggcgttctgttattatgcgctgtctcgacctctacggccagaagagctgccctcagaagaccaagacttatgcctttcgccacctggtcaacccgatctttgccatggatgtccagatcacttggaatagccctccgaacacacctaagttgatggataagagcatgaccgagtctatccagagtcgtttgtggaagccccagctggctgatctgagcgaggagtccaatcaagctggcgtggaccactcacgtatggagttgctccagctgtctgctttgttgatcaaatatcattcacagacggtgcaagattctcgcaaagatatcatcaagtttgcctggaactacatccgactcgaggatatcatcaataagtacggtgcctatgttctgatcagttacttcattgcacactacgagactccattcaagattgtaatccaagtctatgtcgcattgctcagggctcatcagaatgaaggcagagcccttgttacgcaggctcttgatgtcttggctcctgtcctccccacgcgaacagctaacagctctggagcagaggcacggtaccccctgtgggctaaatggccacgtcgtattctagccgaggaaacagccaatctccaacaggttatgagtatcttccaattcttggttcggcaacctgatcttttctacgagtcaagggagcactttgtgcccctcattgtcccatccctagtcaagattacaggtccaccaaacacctcgaacgacagcaagaaactcgcattgaacttgatcagcttgatttggcactgggaagagaaacggacccagaatgccgaggctagccatttggccaatgggacatccgagtctccagttgccaggaaacgcaagctggacgaacctcaagagccatcgccgtcccccgctcttggtcctcccagtagccgtgaacgatcggactacacagtacccaccgatttgcgcgcgtcattgatcaagtacctcatcacattcatcaccaccatacccgaacgcttcttggttccagctgcccagattcgcctaatgcccacaacaaaacagcaaaaccctgtgcccaccggtggaatgatcaacaaagctataaacttacttcgcagcctcctctctcctgagtactggggagatctagacattgatctttaccaaaaggcgactgaaccaatcctagtgggtgacaaaggggacaaagccgaggacaaaatcacctacactgtcaatacgctgcaggttattagggtgctcatagcagctaaacccaatgagtggattgctgctcgtcttcctactatccagaagcttctcgaaaagcccttgaagtcggacaacccagagattcaggattgtctacatggactagaagatgacatggatgtcttgcacaagctgccgcctcctgtccgtcgtgttctggaggctattccagatgaacagcctgatgacgaggatgcgatggatacggagggaacgccttcggagttcggttcatacttgtctgccatcgccactgaaacactttctgccagcaactacgtgtcaagtctgaacatcttgtggacgctctccaaggtcaagcccgccgaaatcgatgcccacattcccgcggtgatgaaggctttctctacaaagctcgcgaaggaacatgttgctgcttcaactcagaatggagcccagctggcaaacggaaccaagcccaccgaaggagctccaaccatagatcaacaagagtttgagattggagttgatctcatcctcaagactattgagctcatatctgttagaatgtctcatcttggtgaccaacgtcgtccattcttgagcgttctagcacagattgtggagcggtcacaaaatatcgagctgtgcagcaagattttgggcatggcagagtcgtggatcttccattcaaccgagtcctggcccaccctgaaggagaagacagctgtcttgcataagatgctgcttttcgaatctcgacctgatcagacaatgctgaaaaagttccttgatcttgtcattcgaatttacgaagattcaaaaatcactcggactgagttgacagtccgtttggagcatgctttcctgattggcacaagagcccaagatgtggaaatgcggaaccgcttcatgcaaatcttcgatcggagtttgactcgacttgccagctcgcgtctcagctatgtcctcacatgtcagaactgggatactcttgctgactccttctggctagcgcaagcatcacatttattgcttggttgtgtggacatgacaacgactgcccgcttgcaccctgaggacttcaccctgttccccgtatcattcctctttggcagcggcgataaagacccgagaaaagtcgatatcacggtcgatagccagctggagaccttcgtcgcagaccggagacgattcatgtcggacattggcgatgtcagagttcgcgatctggtcgagcctttatgtcagcttcaacacaccgattccaatgttgcctaccagctgtggactaccatattccctctcttctggtctaccctgtctaataaagactgcattgacttggagaaggatatggtaacattgctcactcgtgagtaccaccacagacaactggacaagcgacccaatgttgtgcaagcccttctggagggtaccgtgcgtgctagtaatccccggttcaaaatccccccccatgttatcaaatatctcagccgaacgtacgatgcatggtacactgctgcgatctaccttgaacaaagtgccattaatcccatcattgacacacctactgtgcgcgaaagcaacctggatgcgctcgttgaggtgtacgcaggcctccaagaggatgacttcttttacggaacctggcgccgtcgttgcaaatttgttgaaaccaatgctgcgctttcgtatgaacaacaaggaatgtgggacaaggctcaacaactctatgagaatgcccaaatcaaggcccgctctggtgccatgccattctcacagggcgaatactttgtctgggaggatcattggttgatctgcgcccagaagctccagcagtgggagattctcagcgacttcgccaagcatgagaacctgaacgatcttttgttggaggctgcttggaggaacattgaaaattggcagagcgagggtaaccgggagcagcttgagtcattgatcaagtctgtgtccgatgctccaactcctaggcgcaccttcttccaggccttcatggcccttctccaatatcacaccaagaaggacaatatccaggacttcaacagcgtttgcgacgagtctatccagctctccattcgcaagtggctgcaattgccgaagcgcatcaccaacgcccatattcccatcttgcagcatttccaacttcttgttgagctgcacgatgccagccacatctgtagcagcttggctcagacaaatgaaagaaacttggataccaagtctgccgagctcaagcttcttcttggaacctggagagaccgcttgcctaatctctgggatgacatcaacacatggcaagatctcgtcacctggcgtcaacacatcttccagctcatcaacggcacctacctcagtcttttgcccccacagacgaataatgtggccagtaactcttacgcctaccgtggataccatgaaacagcctggatcatcaaccgattcgctcatgtagctcgaaagcaccagatgccagaggtctgcatcaaccaactcagccgtatctatacccttccgaacatcgaaattcaagaggccttcctcaagcttcgggagcaagcgaagtgtcactaccagaatccgaaggagctcaacagcgggctagatgtgattaataatactaatctgaactacttcgggccacagcagaaggctgaattctacacactcaagggcatgttcctcgccaagcttgatcatgtcaatgaggccaatgaggcgtttggagttgctctctactatgatctccgccttgctaaggcgtggtctgaatggggacaatatagtgaccagcggttcaaggctgacccgactgactacgagctggctagcaatgctgttagttgctacctggaggcggctggcctttacaagagcgcgaaatcccggaaactgcttagcagaatcctctggcttcttagtttggacaacgacgaaggaaagatcgcaagtgctttcgaaaacttcaagggagataccccggtgtggtactggatcactttcattcctcaactcctcactagcttgtctcatcgggaggcgcgcctctgcaaggctgtcctagtcaaaattgccaagttgtacccacaggccctcttcttcttgcttcgcacgaacagagaggacatgctgagcatcaagaaacagcatgatcagaagcaagagaagttgaaccgggccagacagcagcagcaaggatcctcgccaagtaccaagccaaatcctgttgctggtgccgatagttctcctgctcaaaaagcccaggctgcagctgcatcgaccaatccctccccgtcagttccgcctgcgaattcacctgctacgcagaatttagcccaagcacaaatccagtctcctgcgcagccacaaaaccctatgcaggcatccccacatgctggccaacctccgggccaagcgcaccaaactcatctacaagtgccaggtcagactggaacaccgcagcagaatcaggttgcacttgcagacggcgagaaggaacctctgaagaaaccctgggagtactcggacgaaatcatgtctggactcaagacggccttccccttgcttgctctgtctatggagacaatggttgaccagatccacaagaacttcaagtgtcccccagacgaagatgcataccgactcatagttgctctcttgaacgacggactggcctacgtgggtcgcatgcctggatcttatgcccaagactttaagctgcctgccgcaaccgaagccaacatcacccgattcgcggagacaattctcccagctcacattcgcaagtccttcgaggcggactttgtgaccaagaagccaaccatgaacgagtacatccacaagctgcggcgctggcgtgacaagttcgaggaaaagctcgaccggagatcacagcacacattcctcgaaaactcttcacctcatctgagtgagttccgcttcctcaagtttgatgaagtcgaggttcctggccaatatctactccacaaggataagaaccaagactttgtccgcatcgaccgcttccttccagatgtggacctcatccgaggcattggtgtctgtcatcgccgcttgaagattcgcggacacgatggcagcatgcaagcatttgccgtccagcatccggctgcccgtcactgcaggcgtgaagaacgcattcttcaattattccgaattttcaatggtcttcttgcaaaacgcaaggagagtcgtcgccgcaatttgtacttccacctgccgttaatggttcctctagcaccacacattcggctggtgcgtgacgattcctcttatatctccatgcagggaatttatgaggattactgccgccgcaagggcattaacaaggatgacccggtgcttttcacaatggacaagatgcgatcattggcagagaccaagcagaacgtaagtgtgccgtacacccttctcatatcaaaagctaacaactcccagcgcacgcccgaccagcaacaggttcttcggacagaaatcctgaccgcgattcaagacaaatgggtcccgagtactgtcgtgttggaatactgccagcagacataccccaacttcgcagacttctggctcttccgtcgtcaatttgcctaccagtacgcggcgattgctttcatgacctacgtcatgcacatcggcaacagatacccgaacaaaatcttgatttctcgttcaacaggcgatatctggggtgcagagttgatcccgactatcaacccggctaaggcgttcttctacaaccccgagcaagtccccttccggttcacacccaacattcagaccctactgggtccgattgcaacggagggtgtgttcgcctgtgcgatgatggcaatcgcccgctgcctgacggagccacgccacgagctggagcaacagctcagcgtctttgtgcgcgacgaaatgatgttctgggctacagctcatcaccgaggtgtcttgccccctggacaactccgcgatctggtctacaacaacagtgaaatcatcgtcaaccgtgctgtcagtcttgccagtccaccggagggtaacttgcctgccaatcagaccaccatcgatctgatctcgaaggcagtcaacccccagcatctagcgtcatgcgatgcattgtggatgccgtatctgtgagcgatgcttgtcggtttgcgtgtttttgtcctgtcaattggcgcggggaactatggctattgtactttctgaagagggggctttgtctgggtttgtttttttctgagcgtgggcgctaggtgcgcagatttacttcacgttactatgattgtgataccgattttttttttgttctaataccttctacgatgtcttgatacttcggaatgttagctctgatagttcttaatggatcgatttaattcgatttgactgttatctgccaatttcatcctgtaacctgtaatctgtaaccaacgcatacgatatatgccatccgggacttaattctcactgatcaatattgcgaagcagaagttcggcgatccacactcacgtttggagtagttatggaattaggtatatgattcataagcaaattcgcgcccggataggctttgttggttgatcttgtcttctctgtgcagtctgttgaacatgtcgtcgacgattttgcggtaagatgggtaacagcttctcccagccgtccaccaaggctatctccatccatcaatcggtttccagatatattaaccagtgcggagttcttattcgagatctcctgccattgaatacattgacaattaggcaattcgtttgccgttgctttgcgccgtagatagtgactccattcggcaggacgttctctcgttgagcgtgtccgaggccattgtataaccgatttagtcattcgctcatgatgtattttccccatggtattcgctgctgtccttttggccatgacattcgccagaacacttggggctcaggtgcagctcgacatgcacatcgggcctctgaagggtgaagtgtccactgattgcttccaattgagggggaggtgagatctgatgctcaccatgctgtgctagtatcaaagaaacgtcgtatattgccgaggatacaggtctcacgagctgaggtatcaccgacaatagaaggggtatccaccgacagattaccagacctataaactcaaggtcacggactagatccgagcacggtgacgggccacggcaggacatactagaagaagatctgtcatttctttagatgcgagttaaagggaaaatgcagtagcaaacagttccccgggaggagagctgtgagagtgataaatcatgactactccgtacttgtgccctacgttgactggtccaatcgggactatttgtaactataaagaagaccattaagacgttatcataattcatttcattgattaaagaaggacctttgtgcaacgtggggtcaccacgacacggtcgctatctccgggttgttcgttgaggctgaaagatcatttcttagccaaggacgcgtccttgtccttcttagggcgggaaaatttcgcccagtaccctccaagctcacttttacgcgccatggccgcctcagcttcacggaattcctgctccgctttagcagccatcgcttcagccttcttgcgtctgaactcctggcgcaagttctctctgtcctcggcttcctctctcgccgctcgaagagcctcctcgtcgatcttttcctgaacagtagcgacggcagcctcgtcaccacgggcttcggtgcgctcgatgcgggcattgcgggttcggatttcgtcgagtgcgtcggcaatttgcatctcgcgcttggagtcaagcatcttgtcttcgagtgcagccatcttgtcacgttccagctgctcctccttggcgccgtgttccttctcgagtcggttgagggtctgcgcctcggtctcgtcgttgtacttctcgtcctcgtcgtcacgccaaactgcgaagttgcgctttgcgccgcgctcacacttgtagtcgttgtctaataattgatgttaggttgtatatagcgaagtggtggcaggatggtctcaaacttactcttggggtcggtacggaaagtgatctcaccgctgcagcgagtgcaacggatatagaaccggaagattggaatcgacaggtatctttcatcgagagtctccttgcgcgcattgaacttgcgacccttgggaatgtactcgccgcagtgagtgcatttcatcgagtagggtgtcatcaggcggacaggggacagcttggatgatttgccatccttgcgagagcgcttcgaagagccttcgatggccgaaggatcgaaatccggggggtaatactttgaaagaacctttcgctcagccatgatggattttgatggcgatgggaagtatgggaaagaaacaaaccttcgcaagagaagctctggcattatcggggggcatcgttatctccacgtgatcaatcagctcggttatcgccgcttaagtccgatgcttcagatggcgataagggtgaaagtcacgtgtggatgacgataacagaaatcccccgaactggggctacgcgctccccagtcaacggtacccgccaacagattttgaacttaggtactttttgtatgagtatacaatacaaaaggaacaaagacataacttatcacgtccatttccccaaccctaaccagctaaaacatgaataaccagtcctaatatataaaataatttcgattagatccttctgatcgtatgattgattctatacaattggtatagaagtacctatgagaagcatatttacgcttggtatgattctacccatagtagatgcatcacgtgacctctgtataatagaagacaaaaactgctatgatactggtctggggaggtcttccagttaccatcattttgagacttttaatagtaattcagcccctttcttaacccaatacatattctctaggcgaacactctacctacattattgtacatacatgtacggagtagttaaccttccgccatcacagacacgcacggaccactgtttggttcaaaatagggcaaggacccgctcatgtgaaagttgcctgcgactcgcattgcttgggcatatctccgggttctaacagaaatatccatgtctgttctctctttgaatccattctttaacacatcttctctgtcaatatggaaaggttcctgcgctcctggcgacaggacgcgttgaaccgtggccagcatgattccgcaatctacattggggacaaagtcctggcacttactagtaagggctacaagcactacgaatatactgatatactgacttgcttgtgaaggcagtgactccgatgcgttttggctagcccaggtacacttttccaataacaacttcacacgcgccctggccctcctctcccgcaaagatctcgtttctcgaagcactgcctgccgctaccttgctgcgcactgctacataaaacagaatcaattcgaacaagccctctccattctcggtgaacacaaccccacagacctgatccgcaataaccacacccggcgcaaaatccaacaccaaagccatgttacactgcgcaatgggaagagtgcgacaccgcgcagtgatcgagccgaggagagagaacgcgaagatgccaacaatgtacggtttgaagccgccatgtgttatttacgggggctctgcttcgctaagcagaatgcatttgatcgtgcccgagattgctacaaggatgccgtgcggattgacgtgcagtgttttgaagcatttgatcagctcatgaagaactcgctcatgtctcccacggaagaattggaattccttgaatcattggactttgattccgtctcatcccccgatccgatgatggcacaagaagccgcccatttcacgaagatgctctacacaacccggctatcaaaatactcctcccccaccatattatccgatgccaccgaaaccctatccacacattataatcttgcagagaatcccgacattctattgtcccgcgccgaagctctgtatacgcaatgtcggtttgcagaagctctagaactgacatcttctatcctctccgcatctcagtcaaccgacctgtccacaaatcccagcattccgacacagaacaaccttggccatgctccagctatttatccgcttcacttagcttgcctttacgagaccggtgccacgaatgccctattcttgctctctcacatgctcgcggatcattcgcccgaagagccttacacatacttggcaatcggagtgtactacctttcagtctcaaaggtggctgaggcgcggcgcttcttttcgaaggcgtcactgctagatccgcattcggcgccagcttggattggattcgcgcacacctttgccgcagagggtgaacacgaccaagctatcgcagcatatagcactgctgctcgacttttccagggcagccacctcccccaactgttcctaggaatgcagcatctcgctctcaataatatgtctctggcgcacgagtatctatgtgctgctcacgctatgtcgactggagctgctcccggctccgtgccttccctcacgcctcatccctcagggattgtctccgcggttggtggggatccactggttctcaacgagcttggagtggtattttaccatcagaatcatcttagcggcgcggtcgaattatttgggcaagccctggcgctagctacttctctccactgcgaacccagtgcctgggtagctacacgtgcgaatttaggtcatgcccttcgtcgcatgggccgtctgtccgagtcccttcgtgaattcgatgaatgtcttcgcgtgggcgcaggaggcagcagcatgggctactcgccttttttgggtggtggtacgggtggctcagcggcgatcgctaccgcatctggggttgggggctacgaagatcgcgggctgaccggttctcttcatacgtctcgtggccttgtattactggagttgggacgaaccacggacgcggtgactgccttgcatgaggctgtacgtgtacttggagcgagtggtggcgggggtgccgccgnnnnnnnnnnnnnnnnnnnnnnnnnnnnnnnnnnnnnnnnnnnnnnnnnnnnnnnnnnnnnnnnnnnnnnnnnnnnnnnnnnnnnnnnnnnnnnnnnnnnnnggggggggggggggggcggcgccgcggggggtgcaggcgtggctggtacattactttcacgtgcacttgagctctgggcattggaggggcgacaaagggaccatacggcttttgaggagagtatgcgagaagccagcgcagcctcctccaagcgccggggatctacccggtcccgtgaacataaagggaaagagcgagttgccccggaagagatgtctcgacggcgtgggcgtcaggagccctttgtggaaggatggacggaggaggtggcccatgtcgccacagccacagccccggccgaagatgaaaaggttgagatggatctcgacgacgaagctgacggccttttgcgccgagctctcgaccgtgtacgacacagccgacaacgtcgaccagcagtaccttctaccccggatatggatgccaatgagccggctgctccatccagtggccgcagtcgggggacacgacatgggcggagtcactctagacaatgacggggcttttgaatcctcctcaggtgaaattttgcgttatgttccatgcattgcagcgggcgtttctgccagggaaagttggctaggggttggggcaattgctttttttatggatctcatactagacgatcaaacagatattgttagggacattccttatacttgtatctagtttgatggaggaactagaaacggtagttcaaacagagccctcttcacactttagcctttgaagctattttttatacggcgtagcgtcccggctattatccactagaggcaagtactagtatagatcaacagaacagagtatgttgttatgttggagtatacgactatcgcccccaaataaaatcaacaatgaaggaaaaggctcggtgagacggtgacttggtgtcttggcaatttctcttctctttcttctctttgactgtctgtctcttctatgcatatcggaggattagccccgtccaaccaatctcattatatcgatccaatcaaaaaccccaataacgcagttaaaacccaaaaacaggtgatgacgccgctgcccccactgggtgtcgggctgaggctcgccaatccgcccgtacggggggcgttttagcggcgatcgtccgtagttgcgcatcactgccatttctgggggcatgtttcagggtttgccttgatcggcccccttctcttgtttcttgccttgaacactctttagacaattcctctgcataccttctgacacctccagatctctccagatccctccagacaaattccaagacacttccagatcatgccgtgccagtctggatctttaccatgacagcctcatttcctattcgcccacgacgcggcttgtcccttctgtgcgtcataaccgcttttagcttcagcgccatcatcgtcatttggtttggcatgaactccgaccgagaatacattcaccctgttctcacccagttaatccccgccggacactgcgcctgcgaatcctctactaccttccagtgctcgacatgcctcacctgcccagaacccggtctacaaacagaccggtcccccgtttggtcctttgaatacgcccgcgacggtcataatgagactctcaacaagagccagtgcaaagctgccttccccgggttattcgaggatgttgcgcgcggtggcaaattctggtcttcgcatggtcgcttgtcgtcggtggaactaggcgccatcaagatcgaacatggtatggcgcgtgcatttatctctaatggccaattatacgtggtcacggcgcggtccaagggggaggatcaccgacggaaaattctggggacattgagctcaatccatcgtgcgctggccgccgacccagaaagagcttctagacgcgactttgaatttgttttctcggtggaagataaggtcgacgatgtgactaacccggaatggccggtttgggtcttttcgcgcactccgactgaggaaggggtttggctcatgccggattttagcttctgggcctgggataaccgcgacaactacatggggccgtatgaccaagttgtggaacgaatcaaacgaagggatattccttggtcagagaaaacgcctcaattggtttggcggggcaagcccagttttgctccaaaattgcgacgcgcgttgatggaggccgctagggacaaatcgtggggcgatgtcaagcaggttgattggaacacgggttccaatgtccttaagatggaagatcattgccattatatgtttattgcgcatgttgaaggtgagtctaatttctcttctctcccgcgactcgaggacgccagctgacgacgtgcgctattcaggtcggtcgtactcggcttcattaaaataccgacaggcctgcaattcggtcattgtcgcacacaaactccagttcatccaacatcaccactatctgttggtagcagatggtcccaatcaaaactatgtcgaggtcgagcgcgatttcagcgacttagccgaaaagatggaacccctggtcaacgataccgaagccgccaagcgcatcgctaataacagtgtgacgaccttccgtgagcgatatctgaccccggcggctgaggcttgctactggcgatcactgttcgatggctacgccggggtgtggaacgggactgtcgaacagtggtccgatcgtaaggaccgcgaacgagggcttcgatacgaatcatttgtgcttctggagagcgtgaagatgtacgaattcgaagctgctatcactgaacaatggcaggctattttgtaaggataggcaaacagaatacgggagactacatacaacccacaataatacgttaatacctaattgcgagccagaatagatattgtctacaacatagtctttgatttaggggtccccgctgacttgaccagcaccatattttattttgccggcagtatagtttgtaatctaagtatttttacatctgaatacgtcgacagcacagcaacttcacgattttatatattagttttgtacggtgactgtgcttggctggttagtaactaaacacaggcggtgagctaggcggtcaaaattaaagacgtagtccggggccgagaacagccccactcgtttccccgagcttcgcattgtttcaacgacagggtacgttgaactcttacatttcaagatttgttcgtacttggacatcaattcatgcttctttgattttatagagtgcttcgttgcgtcattctagtcgatcaccccaccgagcacccatcaagcagtccagtctacttctgtttattcacgaagaccccaacttggttaaaataacccgacaacccagcggtgctagaatcccaccctgtacaaatcagcatacatcatcaagacctagcagaaaaacacttactggcgtcatcttcaaccgatacgcaggatcaacaacccagctaacccttcccagcaaaacaaacaacaaaatcttcacctgcaacaatgcaaacccctgcccaaggcacttccgcttatgcgcattaaacggaatatacgttcctcgaactgtctccctccgaaaccgcccctgcatctcctcaacactctccccccacctctccgcccggaattcgcgcgcatcctcaccccatatatccgggttactatgcaccgcccacgcattccaccccacaaatgtacccttcgcaatgggaagttccccacccagcagtgccggccgcaatgcgacacggttaatgagctgacagacaggcgggaagagacgaagtagctccagcaccacggccgtcaggtatggcagaccgtttataatttcctgggatggattcgggtgagttttggccgtatcaagaatctcctcccgtagccgatcctgtatatcgactcgagtgcccagctgccagaacatcgaggttaccagttgctgggcgttttcatgtgcggttaggaatgttatcttgaggttgtcgcggaattgtttctcggttatgcggcctgatgtgtatgcttcgcccagcatgtgtgagaccatgtctttggattgggtgggattgatttgcgtgcgcttgtgaagcattgccattatcattgtgtacaggcagttgtcgaattcgcgcattgtattgtaggcacttttgcgtgacgggaatagccaggggaagtgatcgaggtccgggaagctgaagtacattggtttgaagagggttgctttgataatagattggagggcttcgattcgaacggcgccgtttggttggcctagactctggtgtgggttagtcttctgtcttcagttttcagctattagagattgaatgttcgtttcagggaggccatggcaaggttgacttgataccttcaaatccaagtccaggaaattctcgctcatcacatccacagcccatttctgtacgtctgccataatcaagattcctctattcgctccaacctccttctgcagatcgattagaacatcgaccagcttcctcgactgcttcagcaaggacgttgtctcaaaaaccttcttttgcaacccggccttcataataccagtataaaccttccaattctcaccatgggcattgatgatgttatcaccaacaagcgtcgcaataacagcatgcggaatcttaatctggctcccggctttcgcatatatatgttcattgcggaacatatcagtcaaccaatccggtcgtgaaacgagcacactccatcttccagcgaaccagactaacacggcgccgtgtttctccagtggagccctgaaccatctttcgtagatctcgtcttggcccattgaggaccataaccccaggattgagacgtagattggaattctgggcagatttggcagtgttcgagagacacggaggtaccaggttaggaagaggagaggtgggaggaggatgattaggagtatggagagaagtatggaggataaggctaaggccatgttgggcgtaggcttgatagatttggtagaaacgagaaccaaagagaataaaacgggggtctgctactctattgctggtactatacagcgaattaggcgtctacttggtccgccgcaccctaatgcattaggtgtcagcagaagtcaacacgcctgcgctgaggtcgtactgtccaccgtacctttttttggccatctttctgctggattctactgctaggtggctttggtgtgttcaatttgcattttggtgattgtgcgctcaacgtttctgtgtggtgaggaatatagtcccccaaatggtactcacaaacggaggttacaggatgtctagcttggcaacttgtggatatagtaatatggcctagtggtcgctttgactgggtcactcctcgactcattttctcatgaccgtcaggtttccgtcggggtgacgcttgatctctgcaggttcaccttcgcgcgagatttgttccataactcatgacggcattcaattatattctcttattgaatgcagactatgtgatgcttaggaagagactcagcctagttgaattggtacagaagattgctatagactagcttgctggtattgtatctattgggttgaagaggaatatgtagacagccacacatgtaccaaagctcttgtccaagatctgaaataggatttgcctaagctccagctaaaattgtagcagatagcgagaatccgtaaaatacagtggctatcatagcaatagcattcaaatggatagccattacatgatttcgcgcgaaggtacggttagcccgaagcaccttcgacccatcggagtcagcatcggtgctctcgcttcctgcatggtgaatttatgttagtcgtataatcaagtttggcgcttcacgaagaacctaccctgtagcgccctcctgaccaacatcgcagtggtcgtccgaggtccatggacgaaccaattcagacatcccgtcaaagcaattaaacaaagagaagctacgccccatggatctttgaccaatgacaaaatgctgtatggtgggtatgttgctgccgtcaacactgtgagtccgacctgggttccgaagtagatggggaaaaggcgcttttggaggataatgaactccttcattggtaaaacttggtagcaaatttttgtattgataaagctctagacatggtgagtcatgagatttcttgtttcttcaggggacaagagacgtacctgatagagctcagtcccgaggagagagccataagagagaagatggtatgggagaaggctgcccactgtcctgcgaaaagagtccattctatcaagctactctgatagaaaagcttgtggtgactggaggagggaagatagcagagtcggagacagtggtagtactatttggctggcctagccgccgacagaatccttgacgtactggctgagatgtcgaccaacaaagtcaaggttgatgaattgatgaacaatggttttagttgtctatgcttggacagccgcccttagttgtagtctcattatgcaaatattgccttattttgtatatattctactatcatgtgaatgccatgctgtattgctttatattacacatatggagggctgcacggatttatttatatcctagactcataatacagacggagcatacaaaccacttgcgggataacaattctctgcatcacgcagttacacagagagatttgctttccagaatccaatccaacaataaaccgaactggatcttccgccagttcctacggctagatctcacatgcatatatccagggagcatgaagcatgaatgagcgatcacagtggcaccacacagcagtgccccatgttcacgaaagaagttcattgacactctgagctgttggaccgagaatgggaaatcagcccgtctatgacgccactgcatgaatgactccttagggaggtgctcgtcgccatatcctcggactttcaaaccaattgacattaccaagaaggtaatgtgacctttccaaaccccagagtaagaaaatatataagaaaactggcagtttggatcaaacccggagtatatccagcgtgagctcattgttcttgcagcattgagggggccaatacacgacgtgtcttatttttagacttcagattgaacgttgcactagctgtacttccctcgcaactggtagcttgtcaccatagcctgaactccctgtcttctgtgaactgttggccgctgtcggcctataggaaatcgtctctctgattaaataccaatttgaacatcagacaatggcaattaccattgccatgtgggccatgtaatcgggtcgtatataaaagctgaattcggagatgtccgaatctacaagaagatgctttgacgacaacgtgtaatttaaagtataagtaggcgggatacttatccaaagtaccgggggcacgtaggttaccactgagggaatggtaagacggttttgccacgtcaaggagtctaaaactagtctggtgggctctgacaagcgagtcttcgagccagtgagatgggttagagctgagagtttcatgggctgtggcgaatcccaagccactagaaccaaggaatgaaagaattcagggcagcaccatgtccatgcacatgcccatgccgaggatagcctcttattacaccccctcgtgcgaccatcatgaaaccttctccaagaatgcgcgagtcggcacaggagccttttctgcaaagggttggcaagctgagaaaggcaggtattttgacatagtcaggtaaaacagcatcacgaggctgaaaaggcggaggttgaaccagtggctttcagaccgaatcactgattacagaagatccgttgtacaagttgcgtcacacagtgagatcaggcgtgactttccctcgtgggcgcacggcctgtataaagccaagggaggctgacggcgaggggccttttccctctgagttcctgtgctggatatcaactcggagcctctgctgacgagatttatatgagatatgcaacatccccgagcccgaaaatatccctcaagaccataagaccgtaaaaaaacaattctttacaagataaagatggaagatcagtctatgagtcccaaggatgatattctcagccaaacacaagatccactggagagaaggagactgcaaaaccgcctttcccaaagaaaccaccgtaggatattgccccaaacagagacgacgggttggaaactgacagagcctaggtcgcaagattagggaacgcattgcaaagcttcaagatcgcgtcatcgccaacgaactgagagctgcagctgctctaaatggatgggatcaggtatataatccttcgctgttcccgaggtctcattcctcttactcggagactgagcccgtctttacctcgcgcggtgtctgtgtctcccctttaatcccagaccaatgtacctcattcatgccgtcatatccaccgttctcgcaatcatggccaaacgacctcaacacattcccacaacaggcgtaccctggcgacctatcccaatttactggagtcagtgaagcaagtccaatatatcccataacaagggctccagtacagctgaaccatatcacatcaccacccagctctggtatcagcggggagacataccgggaaatgataagtacaccggagacgttagtaccagactctttgtctacagcagcacccaatcagccgctgtactacgttgcaactggtcagtactccaactgcacggtatatgagttattatctgagccaagaaactgataaaaagtagaacaggcattaccacaaattatccaggtcatcaacaccatgtctccccaatacaaagtgattgttttggttcccccagagtctccggcatcggcgtctatggctgtattcccttctccaaattattcatatggttctggtcataccggcccaaataatggtcctgcagcacagcagtctgactcccagagcctgggttgtctgtgttatcctcaaaatatacaccctgggccgcctgcgtactccgcttcaaaatcatggatgggcggggggtcatatttgcaagcttgtccattacacaagatggcaaattcagttaccccggggggagcgtttcctgttaggatgatatgagtctgtgtggcggtgtataaagatagaagtggtagagcaggggccgatagtgggatatatacaaagaatgggaatggataaattgtgaatagctagatttaccgacagtgaaagcttatggagtgtatcccgtataatagtggtccggaatatataagttgactatatgaatgaggatacttcgaggtagacttaccaccctaactggattgaatacggaagacacttccaatgaacataatgaggtaatagtagagttaataaaaacggtctttatcttcatagttccacgcaactggccagatcaaatggcaaaagagaagaattaaaggttaaccgaccaagtacggaattccacagacacagactcgaaatctattggatattgtattgaagacttgtgtaattgcttcagaatactctatatctttgcaccaaatataagccaaacatgagagcaagaaaacgagtgaccatggacagaaaagaataacagagcacacaatattgaaagcaaagacacataggaaattctcagtcacagtgaattcgccacagctcccgatcacagttactgatatatccagtgcgagtatgcagcatggcagtattatcactaatcagcagatcacccttctcccaaccaaagcgaagacaaactctatagtcatatgtgatgcgatccacaacctgagctagatcattatcgtcattctcaattgaaacctcacaggtcgagaatttggtcttggttgagtcccatggctgatgccaacgcagacacggaagaccagagatagggtgcttgacgatcaacggcaaattcttgagttttgcattccagaacccatcgttgtccatagcccaggtaatcgtttcgagacgttcggcagaccatgggagaggtaggtaccggaaaaacaaccgggagctcgcaaacaaggtatacccattgccctttggcgcagtagcaggacaagtgaagaactgatagcccggtgggtgttggactttcttcatctcgcctgtttctgggtcggtaatctcgtcgaacttgaacatcccatcaaaatgcattggcatagcctcgttcgaggtcacattgttgcccattttatcagagcggccgttgtcccatactttttggattatgccaaagctccacgggagaatagtacccagctcttctcccttttggacgtagagatcttcttctagagtctcggaaaatccacgtaggacaatcggggacatgccattcgacagctggcggacctttctcatggggatggagcggattgacggtggaggattgacattgtcgatatcggcggggcggatgatgagtccgcagggatagagatgctcgaacttgacagataagccgtcctcggtccagtcaaagagactcgacctttcacggaagaaatatggttgtccgtttttatagataaggtcgtgcgtgtcgcgtacatcttcagcgtgaaccatgcggtataaaccatccagtcggacagccacaacagagtgccaaggcgtatgacccagtgttcctcgcatctgtggaacaagcgagatagaaagctttttctcgcctgcagactcgtggatagacagtcgtacgtaatctttgcggttggctttgatggccgccgcgaacatcttgccccgaatgatcatctgccgtgcggtctcggcaatatgcgcttgccgagcgcgttttgacatcgatttatccttctcctctagatgagccagatctttggttagaaatttaatgtagccccggtatgttaggcatgtatcattgtcggttttgatcgcctccgtcgcatcgaagctcgggtcagcaaaggtgtacatcagttctcggcggagacaactagcgtgggccaaatagaatgcctttgcggactccggagttgaggatgggaaccatggatgctcgagaagttcgaaaaggcgaataaatttgacatgatggagctctttttcgacggccatttttcgcagggcctccccataatcccaaacggtttcatcggggacgctcaggagatctaacacatgtcagtattccagctaggaaaatcatctcgattgtgttctttaccattgtataccagcccatccgaactgatgtagatatcggcaccaggggcgtatactgcaccgatattttggcaaagtccattcaaatgggccaatgccaattcttccccaaagtcgggcatagtacccagcaccttactgcgcgcattaggcgacttgaaaggaaatgcgggcaatatcatgcggatgggctcttgtctggcgatttgctccaggacaattggaacgaacgactcaaagcccttccaggagataccggccttctcaaagtcgacaccatagctttcgatgatcttcaatacctccatagctatcgatttattttccgataaagtattcgagatttcagaggtgaatccattgacattttgttgagtaccattgccgtttgaggcaatggtcaccggatcggcactgtcatattgaggcgtcatctccacagtctgcatcttgactttctgattggacattccattgccgaagaacgggattccattctcagcgagcttagggtggtatgtagtgggaaccatttccgcacccggtgccaaggcgaccattgtggctcgatgtggaatgtatgtttccaagggagatactctgagccaggcactgatctacccagaaaaattatgagacaaaagcttgattagaaggtaactgtattggtctcacttgagtcctgaggaaatagataagatgtgttgttttacctagaaccagatggtgctatataacctgcatcggctaaaacagcaccagctagataactgacctcgagacaggaccgttccgatgactgtaactcctaatgcggaccaacaggtcaagtcttaggttcaacctagggcatcccagacaggaatggccatcaccctgtacaacttggggcctttacttctctacttcatcccatgaatgaggtaattgtggagggaattcgctaaaaagccttggccaatttggtaaaaggcttgaagttagattcggtagatcgaatgctgagtctgagaagcttaaatccaaaaagcttcactcaaccgttcagtgttgttagcaaagatcatgtagaaccaaagaatgaggtggttggaaggatattcccagcgtaaatgagaaaagcctcaattatacatggtgtccaatgactcgcaatgcatccaagtttcaaatttattggacagagctaagcacacgtgttgtgacacctctgctgtgttccgattccacgctgctacttgattcacaagatagtgttcgcgaaacctgcagctcactctttgagctcacgccaatcatacttcataacccgagtaacaaatgcagccatgtcatgtgttgtcaattgactaacaaggtagcatgtggcgtctaagcctgagccgacccctctggccgtgatgagtcgaacaccgtctcattcaacagacccccatcaatgtatcgcctgtgcagcacagtagtagtatgatcccccggagcattgaactgggcacaaatatctcgaagtctgtcaagagcatgatggtgggttgtaacagtcattccgccgagtatacccgcagccccgagcagaaaggcgcccgtgcaaatcgacagcaaaatcctggtgcctgataacaaagcaacaggtagcgctacaaacttgcgaatcaaatcaagctctggtgtgctgttttctagcaatggctgcaaaactgacgggggaccacctgggatgactaggatatgaaagtcggaaattcgatcgatcgcgtctggcaaaagcaggtctgcatgaaccgtaagtaaatttgcagcacgaatcgtggggctgcaagccacagttgtgatttcgaacattcttttggggttttctgggtttcggttgtgcgagacatgggataggacttcgatcgggcctgcaaaatcgaggatgtctgcgccaggaaacaggaggaccccgactttgtagtacttgttggaagatctaagagacataattgccacgacaaattgcaatttggtcttgcaagacgtaccgatgtagacgtttttttggcggaagcgtgggaaggataaataacagcagtagtgagattctcagagctgattctgggatttcgcttgaaagagattagaaaggctgaagtgcattttacctcaaagcgtttctgactctgctgactccgaaaacaactgctcgactttgtccaacccgggtctccgcattcaccgattcgacgcttggagattcttgcaagatgtccatgcgcttggaaacgaggctgtctcatagccagtactcttcttggtgtcagcagctattggtttaagtgctcgtagatggatcctagtcttctagccacatcttcaaccagtcttggtatatgcctagatcctggagtgccagtgtgccagcacctccctgcgcgacgcaacgacttcagggagagttcatcgccatcattgaactttcctggactcataagtactattgggagtagcatttggaataaacaaaaagtgaccagaaataatataaaacccaattgattcagaagtcataaccataactattgttgtaggggattgatactcctgcctggatttccagtaccgcctttctaattaggtacgatcaatttcaatgcatctgctatgggggagaccatgattaattaccctagggatgtgggctcactctactccgtacagctcctcgctgaatggagaatggtggagtgaaatgtaaatctgaagtagagaagagaagaaaaagagggccttttattacaagctcattcttgaatatcgctgtggcgattaactacttttcgctgacgaaaactaaccagagaaggaagcaattctactccgagccttatggaaagggaaagactctgtctttgcataatcctcggtctacagaaagcgtattagatccaaagtatcgcgatttaagattctgtaagagagattatacacatactatatgttcaacgacggatatcacactgcagaaaccctcaactcgtaagaacagcctcccctgcaataattgaaggaaaaaagtttgcaaaaaaaaaaaaacgacaatcatgagttgaaccgaaaagagactccggcgccgcgctgaagaaaaaacaactgaaaactaaacgcttttcgcctccaatcactagccccacaggggtggatgaatatactccgctgcgcgatccagtatgttgggcattgtccattcaccgctagcggagctttctggcgtagggggcggaagggaaccaacgctgggagtcatgttcgcctgcccaggaccatatgcccccatggaagcggaagtcgggttgaggttaggattattggagtaaacgggcgtaccattgcgtcccattgaacgcgtagatgggtttccaagtgcggcaagaagtttttgcaaagcacgatgtgttttcgctagtgacttggcccattgcgtttgtggatcgggggggatcccaaccggagaatttggatccaccgggatgggacctgtgaggttcctgacgcccgtgattgggtcgtaagtcccgagtgcttggggcggcgatgtcatactggccacagtttgggcctcgttggaatcataggcacgttccgtgcttgctctttgggcgatgatgccctcgagtgagtagagaagattccacacattcgggtccgctttcgcctcatcgatgacagcaagcaggaatgcggaactaatcgcccgctgcaataggatccaggaacgagctgcgtgggagctgatgttgtgcatttcgatgtaagcttcaacggtcgtcatcagattcataatgcatttttcgcgcatgctggctgcgttggcgtggctcaagtcagccatgggtttgagcgctggccggcagagctcagaggcgaaataagaagcatgcagttttaacacaacgcgctccaggtgctgcgtaggcgtggaacagtccattgcctctcgcaggtatggctttgcctctaccatgatcttctggatgcggtccttatatgtttgtatgctttccaagcttatctgcgagtgcgggctcaacatgcgaatgcggacaacctctagtgcaagagaaatgacacgagagagactttcgaaataggataaatcgccaggtttggagccatccctataagcaatatctggctggctcactgcagtggtggaaggccggtcgtaggagagcgaaaaatggctgtcttgccatgccatggaccacctattcatgtcagggccacatactttcgggctacgaacgaaaaattatcttaccaaacatgtcgtcggcggtatcgttcagctgacgagaagcgactcgactccacatggagaccgagcgccaagcccatgcgaagtgtcatgccgagcaagacataagaaattccaggattcatgttgtatgacaaaacgtttcctatcactaggagagtttgaattgcctgaatggtgggttgggagaggaaatttgtcatgcggaggcactggtaagagcagcaaactattcaaagtgttagccaacgactccaataagaatttcggtgtaggtcgcataccataaacctgagaggttaattccctttccttgctcccatagtcggatgactggcacccagaggcaaggatagcgaacagtagtcctaggtacgcaatgcttaccccgaagggcttctgtgcttgatctgcatcggctaggtactcgccacccatggaagctcttgttcccagcaggagctcgagtgtgttctcaaactcaaagatgtcctctaaaacagggtatatggctcctgaaatatctttgtagtagtagaataatctacaagaaagcaaagttagcccaaccaatctcaatcaaggggttcaatttaagaaggctactcactctctgcactgttgatcagtgggaagggcgctgcagacggcggtaatatcgaatgttgacatatcggaggaccatagatcaacaaatggatatgtcgcagactcattgtccaaaccaagcttgggcagtattcctccttccaaaagtgcctgaagttgatcagacccagactgattgtttaagatataagccataacagagcgagatcccaaatgaaccgtgcctttgccaagagtattggcagcatggatgccctcgcgttccggcgaggcacacttggaacgggaactcgcatcgccactatgcacgcttccggtttccatggaggctgggaggccgtcttccgccctctctaacccgactcgaagggaggaaatagtagactccatttcctgcaacctattgcgcacattatcccattcctcgcgggcgattgatatacggccaccacctgtggcagggacactcggtcggcttaaggttggctcgtgtttcacttccgctggggtttcatcgaacgcatacgatgctgaatattcatgcacgggtgccgttgacccactagggacagcgctatcatggaaggcttgcgatcgcttcttggaagggcgttcgtaggagcaaaggtctgcatggtcgcgcttaacgcacccgtcacacggcagattgcgatcgcatttaaccttgcgcgcatggcaggggtagcaggcttttggctcgcgagccttgcgcttcgtgcggatgatagcgtctacctgagactgcggcaaatcggagacccctcggttggacgcagcagccatgtcggacgcaacggagggcgagaatgaatttgatgttgggtaaggagacgtcattctggctcaaaaaaaaaagacttcggtacaatatatcaggcgatcttgtgaagttgtcgttgtcgttgtcggcctttacagcggtgtttcatccggtcattggcagcatgggggtggaggatcagaagcggtttgcgagttggaaagcgagttcaatacattaggcaggtacagttccataagttcatcagttaaaccagagcagcatgttaggcaatgagggctcgatttgaaattgcacacgatttgttcaagggacctgggattaagcgccgggaccatgctagaacggcacgtgatgtggggcgtccaaatggggaatcaagccctacgtcagtatggtatgcccttgaaaccttcctagtctcgttataatttgtaaagggcgtaggaagttggcagtggatatctattgtgtattgcttctagaacttgcttaagaagaatgattgcttttgatggcaatgtagtcttgtaactcgcaccgatgcttcaggctgttccatttcatggtctcgatcgacacagaccaggaaatctcaggccatttattgtgaaaagaacaattccatgtgtaatattatggcttgaagtgcttattggataatgatgtcgttacaatgccctcgaaaaccacgtagacgggcaattttccactggggaaaagttaaaaaagccccaaagtggtggctatgcactccagtctgaggcagtccaaaccttggaatgccatttttttttactatggcgatacgaaactaaatggcatttataataaggagtgccaagggagacttcccctaaatggattagaccactgcgccaacagggtttgccctaacaaagagtatggatttgactacggagtatgctgtagtgtacatgtcgggatgtatcctagaaaacaatgacagtatcagcgggcatagactgcatctgtagttagcatgacaccatgacttcaatattagcacgtttggtaaagcgtacttgtcctaggtacagtctgtagtgccgatttagatgatttagatgatttagatggtatttcgaaaagtgcttgcaccggtatctcaatatttgaacgttacttgctgttcaacgtactctgcggtttgctgctgattatttgcttcgaaaaagcacagaaagaaacagcatttttctactgcggaaaacgaacggcacattgtcccgtctaataaactatattgaactcgtctttaatgcgatcggcagacgataatttattatgggtcctgtatatacgcggggagacttcctccatatatgattggtctgttgtgaatatcctgtgagatgactccttaacggtgcgaggatatcgatttattatacggggtaccccatactatgtggcccttcccagaggatttgcaggctctttagtaaaaccatcacttaaggagaaccccctaggcgatctgagtatttcgaccataccacacgcttattctccaatgtattattggtctgttagggtgttctagaatgcttggctaatcgtgccaagcgtccaacccaccttgatttctgctgtgttgacgatcttcggggatgcaaaagcgggttaccccgacgattataaaagtgaataagaacacgccattctccttcttgtatctagttgaaattttaaaaaataacaaatgagtatgagagtatgaaagaacgctgaaataacaataaccttttgtcctatgatgccgcccggggcatctttcgatgtaagacgagtctaggtacttgcaatccacatcgtgtcattgtcgcacggggctgacgctgtatatagcatgtgccgtagccatgggccatccaatctatgatctgctttgccacactaacctcgatatacctcatattgcactttgaccaatattgtcatccgcattcgcttattatccagtatagtaacttcaacttcaaccactggaatagtcatgatgctaccgtcagccgtacttgacaagtgttgccctatgactgtgggttctccggtcgatgttctcatcatatttagaggatcactctcatatcctgacatcatgcttgccccagtgtcatatagaagtccgcataccacctgctatcagggatacgaatagcaatcttatactaagaagaaatcaggattgatcaaacgagaattgttggggatataaagtgcgaataaagtatccatcgggtgggagcattccatccagactaatggccgctgatgaatacgtaggaccgggtccaaccagctatttgtgaacctctcgtatcattacgagtctataaaacgaacttccagggaaagtcactcctgccatctataagtgtcttgcttatagctcaaataccttcgggtcttcgcgtcaggggtgagggggcaagggactatacaaagagaaatagatgtacatagtagcattgaaacggttgttactgtcatttccacttggtcaattggggtatatcaaagaaagcgttcagagttcgaggtagcccaaggagtatgccttcgcagcatacaagacacttactttggcagatctatgcctcgggttctttatattgaatctttgtgaaagcgttggcgagtgagtacaaggaaatggaacttgtttgaacgatctgacattgatacataccattttggttcatcttggcatgcagtttgctgatcgatcttcctttgtcttgagtcaatactcatttcttgtttttgcttgtgtaaattgtgatattttgccaaaaaaaacttgcaattgtaagtagtctgtgtatgatattagaaatgcagtagatggtcataaaagcaagcttgaaaattaatggcagcagccattgtctgatgttcactagggtgagaaaaccatctataacatcatgatgatcgatcccttgaagctagttcaggccctatcatctccacggagaccagggcgatggctgagtcgtgtggtacaaggtcaacgaatgatttttcacactaaatgagtggaagctgcacgacaagtcgaacggtttaagatgcgtccaagttcctcagctttcattttattaatttcgctagttcatgtgtcgacattcgacaaaagatgtggcggcctgaggcgccatgaacgggacggaatatctatatcccggctgaccaattgagagaagtgacgtaccggccagctgccagcgttgtttaggtctgtcacctaactcagcttcattgacactgacattgtttttttccttccgtccacctgagacgaagcacctgttgtcgctatcaaatctgatcttgattcctctcccaatatcttctttcagcttcgatcaccgtaacccgctaacgaagctcaaccatggagggcaaccccgcggagcacgatgaggctgtgtctcaattctgtgctatgactggaactgaggcttcagaggtaagcttcttgctgtgtctatacataacttagtcgctgattttgagtgcgtgattgtctaggctcaggaatatcttgttgccaatggttgggacatcgaagctgctgttacggaattcttcgcggagcaggacgaagcttcacaggatgccggtgctggtggtgcgcgaccactaggcacagagggtagctctggagcttccgcggggggtagaactctcggcggaagtgccgtaccagcttcatcctctgccgcagctgggtcctcatcatccgcccgaagcgctgcgcccaagaagaagtttgctacattgggagactttgcttcggggggaggtggcggcggtggtgattcttccgatgacgatgacaccgacgaacatgatttcttcgcgggtggtgaaaagtccggactagctgtgcagaaccccgatgatttgaaaaagaagatcctcgaaaaggcccgcaggtactttctcctagagatgctacgaatgttgaactcaactaacattcgaatgtcaacagggcgcagcctcctccttcagacaccccggcgccaagggaatcacatttcactggcactgcccgcacactcggtggtgacgatgcaccaagtcaggtgattgaaaacccatcggcgcctagtcaacagcgtgcccagcgtgttcaacggactcttcatttctgggccgatggattttcggttgatgacggtgaactgtttcgatcagacgacccccgcaatgcagagatcctggacggtatccgccaaggccgcgctcctctttccatcatgaatgttcaacctgggcaggaggttgacgtggaactcaagcagcatgaggagaagtacaccaagcccaagcccaagtacaagcctttttcgggctctggacagcgcctcggaagcccgacacccggcgtacggagccaggcgccaacaccctcctcttctacggctagaccatctactcgggagccaacgaagcccaacgtggacgagtcacaacctacagttaccctacaaatccgcctaggcgacgggactcgcttaacgtctcgattcaacacgaccgctaccattggcgaagtttatgcgttcgttgcttctgcgaccccggatggtccaaaccgcgcatgggtcttgatgacgactttccccagcacggagctcaatgactgggctgccgttctcggcgacattcctgatttcaaacgtggaggcgtcgtgatccagaagtggctgtaaatgcactattaatattctctttcgtcttcagagtggttcaaaaagcgaataccagctgggcagtggggtttgtatggatgaacgttacatgacatatctgataccgaagagggaccttcagatttgctacgtagatcaatggaatatcatttaatgacctccaaattcaaaataagtggttaaatcgacctttcatatcccatactagtgcgtccacgttgtagaccgaaggttagtcagaaggcgattgataagcgcccgaatatcggcctccgcccttgaaatccgtcgttgagctttcagttgctgcaacatttcttttctccaaattaaacatacaatatacaactatgcctctcactggggtgaagaatgtcgtgctggtacgtgcaccttcaatcccttgccagtcctgccagcgcgaaaaaaagaaagcccatgcccctcatagcttatcgataacgagagctgctcgaagccatgggctagacacccaagcgcaatttcttagacaaaactaacaagaaacgattggaatttagatcctttccggcaaaggaggtgtgggcaaatcctccgtcacacttcaactcgccctcgcgctctcgctacaaggaaaatctgtcggcatccttgacatcgacctgacaggaccctcaatgccacgcctagtcggactcgaagatgcaaagatcacacaagcgccaggcggatggatgccagtaccagttcacggagctgaatctgcagctgagcccgacgcctcagcaccctcaacacaacccccacgcggttccctccgctgcatgtccctaggcttcctcctccgcgatcgcggcgacgccgtaatctggcgcggaccaaagaaaacagctatgattcgccaattcctctcggatgtcttttggggcccgactgattacctactcatcgatacgcctcccgggacgagtgacgagcacattgcgctagcagagcagctgctcacactctccaccacagacgtagcggcggctgcgcaaacaggcttgcctagacttgctggtgcggtccttgttacaacgccacaggctgtggcgacctcggacgtgcgcaaagaagcgaacttttgcgttaagactaatatccctgtgcttggagttatagagaatatgtctgggtatgcttgcccctgctgtggggaggttagtaatctgttctcgagtgggggaggacaggtgatggcccaggaattaagccttccatttatgggcagcgtgcctatagatgtgaaattcggagaattggttgaaggaaagatggaggcaggggatagtgatgatgaggaggaggacgagagtccaaggactcaaccacaagatagtcccgccgagcctgatgatcgaccgctcgttgaacgttaccgggatacctggtcttatcctcgatttgagggatttgcgcagactcttataagggatattgagtgcccgaatgctgtgtagcagtgttcgtcgtgaaaaaattgtgtttgattgcttgttttctagcgacatatcttccttctcctatttgcattgcgtcatagaaggtgttggcaatctctgaatgtcaaatcattcaattataaagtctacacccggagctcgagtaggtagtgtatggtgtatgtaatcttcttgcaagataactatggtattttccctgatacctaagtcccaaatcgccaagcttcttaatcccgttcacttcctgtcaagaagcgagaccgccgttaatgccggtttatttacgtgtgcctctgccgaaagtagataggcccactaagccaaggtgaaagtggctttaaattagcaaaagatagaacgtaagggagcgtattgaaatatatataaactcccacatggtactctagcacatgggcttcaccatttcctttggacttgttctagatcctaactcacggtaccgtagtgaaaagtctttccgaaaactatatggccgcacagctgcccagaaattagcaacacatgccaagggtcgtatgcgccctccgccgaaaaacccagacttccaagtcctcggcgccgaggctgaactcacgtcaagctctattaaacgtgcaatcacagatcagcacccaggaacgtgcaaatttacccaatatgactggccaaagtgatctgtagagagtatatcatcgccggaagacgtccttcgtccgctcttggcgtccgctcccaaggcttggcgccaactgccactcttattcggccatcgacaaagtcgccttgtacttagccaataactgtcattgatctctttatgatgggctaatactgacatcagaatggagctccatacggtttaggccaagttcaggaaaatattttatcacaggacgcacgcacttggcaatggtcgtggcgagtttgcagctcttataagggcaccatgaaagcagggccgtagaagactgctaaaatcaattccttttctagttcttcaaatttctcttcttctgtgatccaccgcagcccctcgtcgctatggtatcggtaataaccgcgaagtatgactggattctagcccttaccaccatcgctttcgttttcagtgccttcggcaatggtgccaacgatgtcgccaacgcctatgccacttcaattgcagcccagacgctcagcatggccacggccggtgtcctggctatattcaccgagtttattggcgcagtagccatgggcaaacgagtcaccgatacaatcaagaacggcatcatcgatatcaagcgctttgacgacaagcctggtgcgctcatgttggccatgggctgtgccgaggttggcagcgcttcgtggttgatgttcgccactcggatgggctggcctgtctcgaccacgcagactatcgtcggtgccctcattggtgttggttttgcgagcgaggcttctatcaactggggctggacaaagggcagtgtctcccaggttgccgcatcttggggtattgcccctctcgtgtcaggtgccttctcggctataatcttcggtactctgaagtacagcgtccttgaacgtcaagattccttcaaatgcggcatgcgtatgattccagtctatcttgccttgacaggagccatcctcgccctcttcatcgtcatcgaagcccccacggcaccctcattggaagagtttggtgctggcaaggcagccggcatcattgtgggtgtgttttttggctgtctcatcattgcatatgtcttcttcaggccatacttcatccgccgtctcgtccgaaacgatccccgtatcaggttctatcacatccctctcggccccctactgctgagggaaaacccaccgctatactttccaggaaagggcgatgaggccgtgattagctactatgaagatgcttacgggcaagtgcgagccggtcagaaagacgcagacaaagaaaacgtcacattgaatgcagactctgtcatgcccacgccggagattacagcaatgtccagtccggcccacataggggatgatgaggagaaggttacaccggaacctaagccacagaaaaagcacctcgaaccaacggagcggttcatcgaccctgtccgacacctatcctggacaaatcccctgaaggctctcggttatatcaaatggcttttgcttcagggcgtgacgcgtgatgtgattacacacgactcccctgaactacgagcgatccacgcacgtgctcaccggtatgacgaccgcgttgaacatctctggacatactgccaggtggtgtcggcgatgatgatgtcaattgcacacggctcgaatgatgtggccaatgccgttgggccatgggctgctgtgtatggcacgttccatgccggatatgtcgagaccaaggcacccacccctatctggttcttggttattgctggtctgctactcggtcttggattctggttttacgggtaccatatagttcgtgctctgggaaacaagatcacgcagatgtcgccgacgcgtggattcagtgttgagcttggagcagccatcaccgtgatgttggcttcaaggcttgccttgcctgtttccacgacgcagtgcttgaccgggtccgccatgggcgttgctctcatgaactatgatcttggtgctgtcaattggaagcagcttgtctttatttttggtggttgggtcttgactttgccttgtgcaggattggtttcgggactgatttgtttgatggcgttgaatgctcctcatttgtagtagtagacagatagctacctgtcatttttagttttctatcccatcctagcttattattaagctgataaactgaatctaaaaataaaaataaaataaatgcaagtatatccgagaaagaaaagacgattcatcgccggacatattcaggtttgtgcataggcgttatataattaaatcgtcacgatccagtcgaacggcgggtatccttctaaacacacaacggaggatgaccctctatttggtccgcttgtaaatcttgccaaggaaggcctcgaagacttccttcttcagacccttagactcatcgacggccgcaatcttctcgtgcagctcgccaacaaccttctcctcgtactctttgtataccttctccaattgtagttcgttgaaaagggccttgaccttggcctcctcagcagcgtccttgcggccgtaggaagcatccaggagctgacgctgctcgggagtgcagcgctggatggcctggttaacgagccaagagcacttgttgtcctggatatcggtaccgatcttgccaatgacagatgggtcaccgaagttgtcaaggtagtcatcctggatctggaagtattgccccagaggaatgaggatgtcgtgggcctgcttgagattttcctcggaagccagctgcaggtacataagagccaaagcgacaggtaggtagaagctgtagtaagctgtcttataggtgacaatgaacatgtacttctccatggagaagttgtcgaggttgacgttgtcctcgggggcggtgatgaggtcacaaagctgacccagttcagtctgccacgtggtctcgtggaagagctcgacgatgtcaatgtaggcgggatgcgagcggaagcgctgcttaaggatgaggtagatacccgcctccagcatgaaggagtcgttgatagcgatcaagccgacaccctcgtggcggtaccagcagggctggccacggcgggtaatagaggagtccatcatgtcgtcactgaccaagaagaaagcctggagtaactcagtcatccaacccaggatgctgaggtgctcgaattgctcctcggtcaggggctgcttcaggagagcacgaccggtatcagggaccgagaggccacgattgagcttaccgccaggaacattgatattaagagactagagcgcataagatggtgtcagctatgatctttctttcctcaagaataggcatcacgaggttttacttgccttctcgaaccactcgagcgcattgtcagggaggttgtagcgctttgcgtgggcaaggatatcctgggccagtgaagggaaaatagcctcgaagtcggcgcgcttggtagtagagcccatgatgacgaagtgtgtggtaaaagatgacaatgatctgacaagaaggacgaaaacattcccacttccccgcagttgtttggtttgtttggtttgtttggtttgtccggtttgctctcgttactgtttctccaggcgcaacccgaggacgacgtggatttctcaaggccattgaacgatcttcgcgttgtttcagaatctacaagcattcatagctttcccaggactcttgatacacttattgttctttccggttacgcgagttgccgtctcacctgtatcaagaacgcgacgagggccgagaccatttatttacaccggacatttgaaagtaaggattgaaccgctacgtggtgggctttctaccaaaataaggatgagattaaattgtcgcaaaacgggttgataaactgaaagctccatcggcgctacaagactgtctttgaacgttttgcctcggaacacctacctgcgacgaagacgcccgtcatggaagaacctacggatgatggaatccgagagctcatgtaccagctggaaaatgctgcaatcaagtgctctgagcgatgcctttatcaatcatcaaaatggtaacaataataagcttcattcgaacaggcctcacgtgctaatgatgttcatggactcagggccgctgaaatgcttgattccctccggcctttagatcacgaagacactgacctcgagtcaccgatggatatttcagaccctccgccagcaacaaatccttatctcaaagtgcgcgacccagttgaagctgcccttgaaacgcaagagtcctacaaatacctgctggccaaatcttatttcgatactcgtgaatatgaccgatgtgcggccgtattcctccctccgaccacaccaccagttcctttgtcaattacctctcccaactccaagccgaggccatcgcggacttcacacaagggcaaggacaaagcttcaccgtttcaaagctcaaagacccaaaagacccaaatacagcaaaatccatatccaaaactcagtcagaaatcgctcttcctcgccctgtacgcgaagtatttagcaggagagaagcgcaaggaagaggaaactgagatggtattaggtccagcagatggtgagatggcggtcaatcgagagttgtcaggtctcgctagaggcttagatgggtggctatcggaacgaaccgcacagggtttagatgaccaggggcagggatggttggagtatctctatgctgttgtcttgttaaaaggacgcaatgaggagctggcgaagaaatggctgatccgctgtgtgcatcaaaacccataccactggggtgcttggcaggaactgaacgacctcttgggcagcacggaagacgtaagttattgcattgagattctcttccgtctgtactaatttcaacagttgaaacaaatcctcgaacttctgccgcaaaacgtcatgagcttaatattctacgtctactgcagccaagagctgtaccaggccacagaagacacatatcggtcgctctccgagctacagtcaatgttcccagaaagcgcattcctcaaaacacagcacgcattgttgctatatcactcgaaaggtaactaccccggctctgcaacacgcgattactccgtgatctaatatcattcagacttcgaagaagcatctcatatctttgaaggcattcttgccacatcacctcaccgcttagacagtctagatcactactcgaacatcctttacgtgatggaccagcgacctcaacttgcgttcgtcgctcaggttgcaacggccaccgacaaattccgcccagaaacctgctgtgtcgtgggtaactactattccttgaaatccgagcatgagaaggcagtaatgtacttccggcgtgcactcacccttgaccggaacttcttatctgcctggaccctcatgggacatgaatacatcgagatgaagaatactcacaccgccattgagtcataccgtcgagccgtcgatgtcaatcgcaaagattaccgcgcctggtacggtctaggacaggcctatgaagtcttagatatgtctttctacgccctcttttactaccagcgcgctgcagcattacgtccgtacgatccaaagatgtggcaagcagtcggatcgtgctacgcaaagatgggccgagtggaacagagtattcaagctctgaagcgtgcattggtggctggatcattacagccagatgatggcgggcaatcggccactggcgcaagcgctggctctgggagtcgcaagatccttgacccagaaaccctacaccaaatcgcgacactgtacgagcgtctcggtgacgaagaggaggccgctgcatacatggaactcactcttcagcaggagtccggcgctcctgtcaatgaaaacgcagacgatgacgacacctctgtctcggagcatggcattcaaagcgatgccgagattgagcattcaggagacgaagacactgatcagtcgcaacgacatcgccgtaatcggaagcctcgcgcgaaggctgaatcactcgctatgcagaacgatgactccattgtcagtgatacctggaacggcaccggcgttacaacaactacgtccaaggcacggttgtggttggcacaatatgcgtcacggaacggtgatcttgaccgtgcagaccagctagcgagcgagttgtgtcaggatggaattgaagtggaggaggccaaggcgttgatgagggacgtacgggcgagaagggaggatgcgacctaattacattgattgaatgaaatatgtatggattatcatgacagcgaaacagccatggatttgacaagtctttatgaataatagctagaagcaaagtctgtctctgtatgaatagtcttcaggtgtggtataattgtcattcgtagaaagaaaaggggtattaattatataagatatgagccagaggtttaatcgagatatactcgcccaacacagcaatagccgtttcatcgaagctcatctcaatccatggcgtccttggtccagagaccgccgagaccggaggctctgttgtctctgtcatatcataacaatagcgatccgaatcagagcggagttcccctcttccggtggatatatcttcagaacgcttgctgagactccatgagagacagccgtagaaataatcgcgtccaatatctgtccaagtatcacgcaggcagaaacgaaggtcatctgggcgtagatcacattccaacatgctcgagcccagaaaaaatatgcttcccatggaaggcagtggacatattccagtatcaacgaaaatggaaagagtcttggcaagacggtgcatctctttccctagttgagttgctatgggatcaaacaggacaatgccaaacctggacccctgcgatgcggtataagggttggacgtttgaagggaagaagcagattcatcagagcagagacaccgaacaaattcatccaaatcgcgatcattgctgggcttttcatacatctgcgggagtgtaaaacttcccagtgatgttcccggcgtccatatggggatagttgttaaaggagattggggtggcatcttgcgtttctgcttgggcgatgtaggcaccaaaagcttgcccgaaaggggttcctgcgccccgtataatttttgagagtgttctttgcgtgcagaaatgaatttggttgcccatatgggacgtgaaaagctcgaagattcctgccatgcgatctttccatccttctggctacgatgttgacgagatgatagattttcattgtccacgagtataatgctctcaagaacagagttctcctcttccgtgggaagtgtcgtctcatcgatgtagactaaggggggcaggggatgatcatggctgtcttttatcattgaatcttcaaccagcccttctaccaatggactcgcgtccataaggctctctccaaaggtagtgacggcttggtgagcctgggatgacgggggatttgtctcatcgtcggtgtctgaacaagtcgcttctgggcttcgagatcgcacaatacattgatcaagttgacccccaaccttgaggcgtttggaccatctttcacgttcctctagttcatctgcaggcacagcccgggcatgttctgctgacagctgcagttcatagaaagaaatacactccgccagcgttcggtccgagtgtatcttcaaaatccgaggaaatcgaagtgtggagtatctcgcaccagacggtttttcaaacccactacccagcatctcgacgatgaacgggtacttgaacaatttggttgcagtggggagagcttcgtgcccgtaatcaatatgaaagccttcgaacgtttcaggttcacgtgcataaaactcgccgatttgattaagagtttgcatggtctgaatgctcatgttatgtcggttaatcacatcaacgatttgaaaatgcggcaaagcatcgccctctttgacccgatctggattcagaagacagccaacaaaaaagtgtgtccatttcagccctttgatttgtcgcagatcagaagcatctcgcgcgttgtagctagctccgatcaacgcaaggtctaatgtgtctccaagacccggtatataatctttcttgagtttgatccatcggccaaacatatggtctacaccagtagagtatatcggaaaatagggctcgtcggaagccttcaagacatatccttcccaacgtttagcgattgctttctcaaaactcttttcgagccgatggtagctatcagctcggttgaagtccagaacttcctgataggcgagatccgctcggcccggaattgttttcaccactttctgtaagagcagtcgtctttcccgatggggcttggcaaggcatacgtcgtcatcgaggagaagaatgtcaaagaacatgatcatcaagtgctcgtacggttgtggcctgtatcaatcagcaaaaagacttatcattttatagaagtggtgatttacggagaatcattatcaacgccaatcatggtgccagatcttggaataaacctccgaattttgttgaaatccatcacttgaccactctggtcattccacacaagcagttctccctcaacaatacagcgggacgtaaattcgcagccaggcaatccagtgcggagcgattcttctatcacaggtatgatcttatctttatctgcggtcgaatccttgccacttttcgagaaaatctgaatgggcgtatatttgttagagagatcgacgtggatctgacagtattcaccatcgtatttccgttcgatgctcattcgacgaccgttgaccatttggtgacaatgtttgatacttcgagctttgtaataatcaggtcgtccaaccttgataccaggacgagggcgcatatgctgtagggcaattgcgttcagacttctggctgtttggggatccgggtttggagggaaattgtttattgggtccgaggcaagcatctccagcgccccttcgaaagagttctgaagctggagtaattgcggaagaagaaaatggaatttcttcagagtatagttttgtgggaaaacgaccggagagtagcttttgagaatcatgcgagtgagccatttcgcgtcccggctactcaatcgacggtacagttttgatagagtttcttcaacgtctacagctgtacgggtccggcgaacttgagggccagagaagcggcaacgcgatgcaattctcaccatggcacgatcgatttcttctaccgataactcctggcccgctgggatgtaattctcggcctgccgcatgacagtttcgacacatgctccgagatcaaaaccaccaggactttgccatcgattcagttcagaaagccgcgatgatcccaagcctaagcagcgcccgatgactcttgatagctgcattgcttgcaaccagtatactcggtccgttcgtttttcggggaacatgcaggtaagcaacgccaccctgtctgttttggcatcatggatggttcgttcgtgtcgagcgaaccactgggcgactgttttaatgtcaggattctggttcctggccgccgtggatgccttggccgttttgctattgtctaggttggacagcagatcacacaagagggtgaatttgaagcccatgacccatatctacgcgagttaactagtaactctgcataaaaccgtggaataatttgagatacagtcaaggaggtcaaaactcgcgactcccgaggtcgagactttggccgcgctgtccgaacgcgaaaagaggaaagaagatgacacgtgagcacgtgaccactttagccccattatatggagaaaatggagaaataggtgagtccttgtgattttgagggtatttagagtatccaggtgcgtgatctgccggaaatagaaggccaccatatttgatatcgagtagcgaacagttaaaatagcctcgaatcgatccattgccccgtagtcaaagcaaatgcgatgaggagcatttgtgcgatagctcttcatatctaggaatcatttcaaagagcatctcagtgaactctgaagactcatctctccgtggattaagtgccgcaaactcaaacccttctagatatatcccagcatctccccagtcaatcagccagactttgccctcggaacccaggatcaagttgcggggtgctatatcatagtgggtgagagttaacttgttgaaaaaaacggtttagtatcaggtggtgcgcgatgaaattgttgggtgatctcaagtcgccgattgaaccaggcctgtagttgctctgtcgagctgaatgggccagcccccgcgtctggaaaatggcaaccacgaaagaaacaggttatgcagcctactagggctggtagttgctcttgttctttgggtatggggataaggtgtagattgttgatgattgaagcagctttagagacgacgtccttgcgttcaatcggacttaggtcttcccagcaatccttaactgttctaccgcccacaaagtccatgactatcaggcatctagccccaaagaagagatcttccgtttggatactcaacactcgatggactttgggcactgggattgatggtatttctcccctctccccagccttcgcaatgaggtcaaggatattggcctcacctggtcgtgagcttatccctcctttaataatcaatgttcgtgacaagcgcacaatccgtgtcccttggcagttatgaagaattggtgctgtgttgaagagttgggtcagggtttcatctgaaacaagggaaacgtcaacgccatcgagggggtatttttcaggttctgggccttttctgctgacaggctaagagaaacattttgttagcttgaaataaccgtgtagggagacggattctcccacttcatatatgtcagaggtaacaagtccatattatcaccaagcggggtagacgcctagaacaagcaccagatcggcataggggatatagggctacttgtagaagaaaacagaactaccagatatataacaatgaggttataacatatggttaaatgagaaatatgacttgaagatgtgaagatatgaagagtgggaagctgcatgggctccgtacccacgtgagcacctcctagtacataagagagaaagtgaatatacaaacatcgtcgtgttagttatgtagaatctattcaaggatttagatgaatccacattttagtccctactatcatgctccctttgttctactatttaccgctcactttctccgcttgctatcgtgtatagaccaataaccttgttatcttattagatgagcaatatgcttgggtacctacatggatgtaagtataataggcagctagcactagtacccagccatgaatcagtccagagagcacaactttcctctttcccctcaacttgccctataaacttgtgcccactctctatctcctgtgaaaatgagtccttagtctcgtcagatcgaagctaattatagatgacattgtagcgaacctcctttctctagaatgtatcaccaagtgccctcttttcaacctgtgcgatttatcccctcggctgaaaaggaagacatgctgaatagcactgtgctatttctctacgctgttggccatcagccactttccgagggaggcagcctctggtgcctgtacatagatgttggcgatggcagattagtgtgtattgacgctacgccatcctagaacgttcctgccatcaaaatgccgggtggatcgaaggcctttatgcttattagccttttaccatacatctacctctactcttgatgaaatccgtcatacggtcaataactacgttgtccaaatacaagtcttagaaacaggatttctacttgtatcagggaactcctaacacagctacgggatctcgccgtcctccctatcgcccttacccaccaggatctcgctccattcaattacctcatcgaagagtccacgggccgggttcgagctgtactcgactgggatggtgctttatacctcccagttgggtcaaatttccattttatggataatctatttgggttcatgaccccaaaagtggctggcatgacacggaggatcgtcaggaactcgagacagcgttttaccatcgggctctggctagtctgctactcagggacttgggggaataacaagagagcaactggagtcgcagaaggcgatcgggatgttacggtacggcgtggagcggcttctcaggttgaaagacgaacaatccgagcactatctagatggttaccttcgggggttatcgtatagctgggtatctagatggaagcttgatgatacagttagtaaagcaatatgcagtggcatgtcattaacgtatagagccgagagttgatgatatggtatgtatggctttcccatcatttgtgaacacaagggctttagaccccagtttctggatatcaaattcaaggattgtaactgggagattggatcatctcactcttgatcttgaaagttgcttactaggcgtagcatggaaggtaaatcgaggaactaaagaggccttacctacggctggttgccatctgctattttaatcgagtgaaagatacggagtatgtaaaggttagatcttcaagagccaattcaaaggcacagctggcagtctaacttcactatagcactggcggctggagaatgcagttgtaataaaaaaattggatgttttattcataacagtaagtttgtggtagaatgagataacaggagcccatgagctaattcaaacctgaaaatggggttgaagactatgcattcgccgaacaccgagccatttgtatgaaatcaaggacgccattgtggaacaaaaaaggaggaacataaagccctctccctttagagaataccctgcttttgcaaatccaagtagatcctttcgggcataacgttaccctctgcatcctccatctgaacgacattatcccgtgaatctctgtccttcttccgatccttttcgagctgatcccaaagcgccatagcctcattgatactggtgatctcacggaagagattggtgttggaggtaatgccgagacactttaatccgtggacgtggaggttttcagagaagtgtttgtcgaatgctcgtcgacccatgtaggtgtagtttccgcaaatctcgcactgatattcgacaccgaggccatggagcttgtagagccagaatggaataggttttccatcccatgccagtggcaatttcaatgggttgtagataacctcctcgtcctcttcatctgattcttcgccggcacgaggctcgggacctgtgtgatcgagcccagcctgcacagcttcccattccatttggcgttcacgttcagtcataccctgtcggcgctcaacattgattcgtgtcgcctgtcgctgctcgcgcagaacattcgccaaggatcgaacttgatgttcgcgtcgtgcaacttcgcgctccttgaggctatgggccgaagatgtgccttgagatgctgatggtttctcgttggatgcgcctgctgctttgcgggcttctgccgcccgaatatgtttcttgccggtcaagtggctccggaggacgttctcattcttaaattccttctcgcaatctgcgcaccaaataccctcaccggtcccttcggtagctgggccagacgcaccatttgcagacttttcatctgtccaaccgggaacctccttcgcaacccattgtttttcgaattcgtcgtcgaagctggcgaaaagctcgttcaagggttgcagtggctgaactctcttgatgaaactctccagatagctagcaagctcgccaacatagttgaaataacgatcagagagcttgtctttccgcttaattggcaaaacaggggatgtgaagcagtcgaagatatcgaggtattggacgtatgacaagcgcttaaccccgggaagattcaggtaatcttcgtgaatagttgtgagatccagatactgcccaaagccttcttcgccagtgaacatattatcgattgcggtgcggggagcctctccttcgccggtctgacggcgattatatgcttgctcgaggttctcggttggttcgttcgggtagcgcttgtggtgctctttaatttcccctagctgcttgtaaaattcttcgaattgatcgcctgtcgagatagactgcacttccttctgccgcaatccatcggcgtcccggtagatctctaagagtcgctgggactgactctcaattctgtctaggaactgggagacttcatggtcgcgagccaagtggcctcgagcctgattaatcggtatatgagaaagtgtgactggcaattttgggcggtatactcacatttcggggctcttccgccacgcgatcagcgatagcctgttctagccgctctagatcctcgtggatgaacctttgatcttcgagcaacatattttcaatatgactgctgcgcaagaaaagctttttatcggcgcgcaaagtgtgttgacaaagttgcgtggcgatcgcaaaagacgttgacatttggcagctccaacttgcgggaaggtcatgtgactcgaacctttccaccgcgaaaagttaggccggttgacctcactcacgtaaggcttcactcttcgtgaattccgataccatttattatctgccgttgaaatactcacacttacatcatggcggatggaatcgacagacgcgccgagggtatgtggttctaacattgggacaacatgaagcatgctaacagcaactagagcgcatggaattcaacacctccaaggaggtgacggtcgcgccgaccttcgaggacatgcatttgaaggaaagcctgcttcgtggagtgtacgcttatggatacgaatcgccgtcggctgtgcaatcccgtgcgattgttcaaatctgcaaaggtcgcgacacgattgcccaggcccagtccggtactggtaaaactgccacattcgcgatcagtactctgcagatcattgatactgttgtgcgcgagacccaaggtatgtaccactctgtctaatctgatcagatccagacctaaccacgatccggtttgtaacagctctggtcctgtccccgactcgtgaactcgcaacccaaattcaatccgtcattatggcccttggtgattacatgaacgttcagtgtcacgcttgtatcggaggaaccaatgttggcgaagatatccgcaaactcgagtacggccaacacgttgtctctggaactcctggtcgtgtagccgatatgattcgtcgccgaaacctgcgcacacgtcatatcaagatgctcgttctcgatgaggctgacgagctcctcaatcgcggtttccgtgagcagatttacgatgtttaccgttacctgccccccgcgacgcaggtcgtcgtggtctcagccaccctcccatacgatgtcttggacatgaccaccaagttcatgactgaccccgtccgtgtcctggtcaagcgtgacgagttgacactagagggcatcaagcaatacttcatcgccgtcgagaaagaggaatggaagttcgacacactttgcgatctgtacgacaccttgactatcacccaggccgttatcttctgcaacactcgccgaaaggtcgactggcttgccgacaagatgcgtgaggccaatttcaccgtctctagtatgcacggcgagatgcctcagaaagagcgtgatagtattatgcaagacttccgtcagggtaattcccgtgtcctcatttctactgatgtctgggcccgtggtatcgatgtccaacaagtctctcttgttatcaactacgatctgcctaccaaccgtgagaactacattcaccgtatcggtcgatctggacgattcggccgcaagggtgtggccatcaactttgtcaccaccgatgatgtccgcattcttcgcgacatcgagttgtactactcgactcaaattgatgagatgccaatgaatggtaagccacgcagctataatatttctattgctatgctaacaatgttattgcagttgcggacttgctttcataatccccactgtctgatattgtgattataacatcttttcctacgccaaaaagcgacttggcttcattccttctggggtcttctgcaaatcgggtgcgcttgtattgttgattgaatatgactcggaattcggcacaatcggtttgaggaaaatacaaggccagctctagcgtggaggaaagggataataacatatttcagtaagtcgaatttggaacttgctaccattcactcaacaaaactaacaatccgaggtagttttcaagaatgccaaccgattcgcacaccctaggaggtgtttacgattttgcttatttctaaaatttcgggcctcggcctaagtagcagggactttttttgacttcggagtttctttttttattactttttgacataggaatcatgaatgatggatttgttttactttcgtacaatgtgcctctacttcttggccccaagtctctcgtctggcgacttaaattcaccagtgagatacctaccacgcgtcaacttctgttgctccatggttacgctagttaattcctactagagcgaacctctactagaaaatagtgtgaatggtaaatttgatttaaagattgggagcaaaacaagccaagccccccccccccaaagaaaaccccaactcagaactggaccaaaaaaaaggacacaacatatatacttctcagaacccagaacccagaaagaagatacggaccaacgccagcttcctgtattaaagaaatagatgctagctgcagagcgtaaacagcatagggagtgaaaggggaattcaaacgatgtatatgcgcaagacagaatgaggatatgacgggcagttgatgaggggagagagaagaacacagaagagaattcatgaagaacaagaaaacattgcgaaacagcaggtttatcatctttcaatccaaagctccaagtatgttccctcaatcaggtacggtatcgcggaacctaaataaagacaggcaacgagcgtgaacagaactggtttcgtggtagtcattgtcgatgtggatatcagaaagtggatgtcgtcctcaatgcgctagtccgcgtgaagccatttgagggtaacccgctgcgttgaactggtcctgttggacgggatcgattgctctctcgagaccagctggaagttcgagttagcggtgctgttcaatgtgagacgaggatgagagggattcttacatccttactgcattatcgtcgcctgcagatgcgaacattcccgggtctgctgggttccatgatattgagttcacgcatccggagatatgcccctccagagtctctacgatgttgccattttctttgtgccagatgtagactttcgagtctggagatagttagcagcgataccagaaatgacattttgaggtactcaccttcacttccgctgacgacaaaattctcggctgctcctccgaacgtgctgcgaatcacgaactcaccttgcttctgtcccttgaactgtcggacaagcgcagtggtttccatgtcaactagttggatctcgccctcagccagattaataagcacatgccgcgagtctttgctgatagcaaccgaggtcggtttgctcggcagtgggagacagtagtcttcttcatatgtaagcatgttgtacacatgaatcttctcttctgtgtcggcagcgacaaggcgtcgtccatcagggctaatggcacagtcctgtacacggaatccgcctttccacgtgtatagagactgaccgcgcatgctccagtgacggagctgtgattcggcatcgagagaggctgtcacaaaagattcaccatctggtgcccaggcagctgcagtcaccggttgacggtggtggttgatggtgagcagacaacgaccgctctaaaccatgcacagcccgagttagtatatcattatggatttacatgagatttaaggaatcattacctcaacgctccatacgcgtgccttcttatcttgcgagcaagtaattagttttgagtcatctggactccaactggcaaacgcaactccgtcctcgtgttccgtgagtctgtgaagaacactgaagtcggctgtgttgtagatcagcacgttatggtccttgccagcagtaaccagcttagatccatcgtgagaaaactcgcaataccatacttcatctgaatgctgagtcaagtccacaatgacatctaaagggaagtcatttcggtcgcacatatggtcagagtagagcgacggaggctccgcggtattgtgatagaagcagttgttgatttgagtccgcttgacgtgatctagtaagatagccaggcggtgttgcgggatcattacagaaggagaaatggattctgcggctaaaattagcaccccggttacaccacagacattaggcattagattagactcacttgacaactcgccaagcagtcgttcacgagacgaggtaacagagccatcccatccagtttgagtatgtaagacttcggttgagcacataagaagactaaccaagataaatggtaagcaaatcgggttctagaaatatctatagatcggcaataccttgatagggcgtgtagacgttcaacatcaaaattcaagggcgtcagttcttggcgaaggacgttgagagctgcagctagatcacgcgcttctagcatctcgaggaatttctgttgtcggagatagaatagcatctcgttcttatcggcctcctctgctaataccaacgtctcctcttgtgaagacttcctgtcgacctgttgtgacccggcatttcgaaacgactgaatcaagattctctcggcctctggccatcttccgcccaacaccgcatttcggaacgttgcgacccccgacgtctccagttcatagccgctctccgagcttaacagggatgccgactcattataacccagctcatatagactctgtatcaaaatccgcgtcacctcctcccggttatggccatagtaagtcgaagactgggatggccttttagagccatttgcgtgagagctcccgttggttgccgcttgtccgttcaaaccagccttcctcgatgatgcaagtgattcgttcgaggcatctacgaagccattttctgttgatgttccgtcgggacgcatgattaccaggcgcctgcgcttgggggaaggagatcggtcgtccggtcggccaagacgatgactggggtgattctgagaaacagtatcacgtgctatttgtggaaggtttccggtccccgccgatgagggaccaacgttatccgggctgctcgaaagacggcggcgacggttaggccgaggggtagatgagctgggtggttgagatgcggcggacaggagctctgacgtttgggaaccgggattgcctaccgaggcgggagctgtattgacgggtaaaggaggatcagggtggtcggaggtgatatagggatgatgcggtgatgaattgtgagccagttcgacagtatctttagatctgcccaatctcctggttctttgaaagaaccaggtgagcagacctcaagcggtggcgggttgtccgataagtaatcgccgggagctccgtcgaggaggggcgatgcagctgtcacaaggtcaaatggacggtcactagctcgagctaatagtcatagatgtagcaaatgatcaaagagctgtagatcttgcgaaatcacgcggttgtgatgttctccgctttgattgggaactggttggggcttatcggtggaagagagaactgccagtctgagaaagcaaagtctgaatattgatgtggaatgtcaagttatcagatgtcaaatgtcggatgttaaatttcgaatggttgaaagtgcagaaaataaaaaagaggattgggtacgcgcggaaaaggtcgacgatctactccgtacatagagcgtaacaccttatgtgctcccttactatatgagtacaggtatagatatatttgtacgacagtaaaacatatgaactaattgaatattcgttgaagtactcatatacaacatatatcatacatctaatctatacctccgcctctaccttcctcgcctattagctgtcatgtttcccatgtttaccccaagagactggagtcactatccttaaaggataccttagatagaagatgggagatggagaaaggttatataggtaagatatttttcgttgaggaaggtgccctgcctatttgggaagggacactcccccattgttgatcgtcatgtggacatatatgatgccttatacagtcagtccagtagctacttcatcaagcaactactgtcaacaagaaaatcggtctatacgcttgagtatcttcgaatgaaaacaagattgcttgctcatagcgagctccccgatctagcgccgtttttcccttagaaagagcgttacgagcaatataccaatatgagatagctatgaaagctcctctaccaatctacctcgagagctatacaggcttaataagcaatacaaagcacctagttaggcacttagactagttagctttggaatcgccgaagtatacgtgtgtggtcagtagaattctacctccatatttccatcaaaatgttctgcaaacaaccaatgtcttctcattcgtccattctttcttattttccgctctcttggcgtacactatatatcgtgttacttttccgcaacgacgttcttccgatcattgatacacagacgtcaatgatacttacattctgctatatatattgccggatgtagggtagttatccatatagacagattactactccattacataattcctgtagtaaaagctgccttggtttctccactgacgccatgatgatgatgccagtcatgcggatatataatcctcttattttgcgctcaatctccaaggtcctcttcatcaccactattcctatacttctacttcctacaaatactattaactaccttccaacttattccacatcttttcatcatgggttgtggttgcggatctaactgcaactgtaccggcggtgcccagagctgctcctgtggcgacaactgtaactgcaagggatgcggagtacgtgatatcctcataaccttggaatgtttcatgttcaaagactaactcagctgtctaatcttagaagtaaattatttccccacgtctccgactccaatgatgaatatggtgatgatttgacgcaaggaatcaaagttcatagagattaaattcgatctctcaaatcaaaaatgtactcccaagtctttttcgtgacatgtagatctcatcgtttctctttcaacactgcctcggaagctttaagcgctcccgtaatactaaaacatataaatggcgacaacgcatacatgatctatagatatagtcagcgaaatatcttttccccgtaaagccacgtaccgtcaacgttttcgcaataaccatcttttccatctcagacgcctgcgccaattccaccaaccccgaaatcaccagcgccgggggaccagcaggcatcagcatcatactaaaccagagcattggatcatcaccaaggagacgagtcctcttagcaagtccataaatcagtgaaatacttagtgccggccagatcaccaaacgaacaacaaagatagtggtgatagccttgatggggatacgggccgaattcccttctgcaaccgtccgctcgaacgtgaccccaagcctacacccaaccatgaagatttgcagcgttgtaaacagcccgccgatgttgctcacacttgcagtcagccacgcggtgaatatcccgccatcatcttcatcattgaagaatgcccggtgcaacgcggggactagacccagcaccgtaccgacaatcatgcagattattgccacgtctgctaatggatactcgaagggtgcgagtagttcttgcttgactcggtgcgggaataatgagcccagccagtgcgtcgacctccgaatcaggttcccagctgatgttcgggcttgttgggcgcgctgcgggagcaatgaggtttcttcggtgagttgctcgtcctgtgctaggatatggtgtcgctcctctgagctactaagaccgtctccacgatcttgtaacatcctcggtccgacgacataggcgatggtcttgctgatcaccccgcaaacaaggaagtaactctgagcacgggagattgccgatgatgtggtttcaccatgtcgtaggatcagttttaaaattcctacactcccaagagagtgaagaagtaacaagggtagagacgtagtgttgttgaacgagcaagccggtgtaacccattgaggtaggccaagcagatatgacgataaatggccgagactaatggatgcagatgtgtagagaactgaccagactagtaatagatggatgcgataggttactgttagttatgctgggttcaacaagagtcgccatgatatacttatgactgggatatagttcatcgctgtctggagatgaagctgctcgccaagattcacgatgagtagtgccggtaggaggagtttcatgcctaatcccaacatgtcattgattgtagtctcctggagcaaatggagccgacgagcagcaaaaccatagcccattgttaacagcacggaaacacaggcttgtagtgcacccaggaagggtgttactaagccttcgctggacatatttgctttttgaatcgctggcgctatcagctaactatgttttcgtcttcaaaaacttataattctaatggccgtggcgtcatggtgaccgagttaactacaaatttaccaaaaccgctcgacattgtatgagcattcgactatcccaaggacatagttccgatatatattatatatatatcatccacactagaaaatattcgggccttcgggggagtctatcaccgagcacggggattccccgtagggtgcttgctatagttaagagacgatagccctaattgggctgcatcttccttctccaaaagcctcaatcacttcaagtggactttaatcacgcgatactttgcagtctatataccatagatacaagcccaataaatataatactaataacacttctccaaattggcccgttcaaacgtgtggggggcctcgggtaatcggtcggaggaaggccgagttgtcctctcagcgcaagaacataaagaacatcgttagaaagaaaggacagtctttctactcttcatctatcacacaaatccttctcggtcttaaacaatgtcttccatcatactccgctcagctttggaaaccacgccagtggcatacggcttctggttaacgtatgtttacaccccgcatttggagaggggcatcaccatcccccgctgctcttctcaacctcaaagctgtatccaacaagaggaaaaggaatcaagctaactggccttctaccacagcctccccagtgccgccgtcgcaaagacaattctccgccgcagtcccgagttctcggaaggtggattcagctgggttctagttgacgctgaacatggattgattaccgacacccactattatgaggtttgtcattcgagtgaattgaactcgagaatttattattgacaatcacatctagctcactaatgccgtcggccacgagggtgctagtcctattatccgtgtgccctggcccgaagagtggatgatcaagcgtgctctcgatgccggcgcccacggagtcatgactcctatgtgtcactctgcagtatgtgtaacccggaccgctgcgttcgcacttttctctttatctgtcggatctgtatctcaaatgctaacacccgcttttctgcgtctaataggaggacgctgccaaggtcgttagctactgcaagtacccgcctgtcggagtccgtggatacgggcctatgtttacgccgcattcatttcccggcgtgaagcccgccgactatgacgacaagacgcacggtgaagtcctcgttattgtgcagattgagtcgcggccgggtgttgagaatgtagaggagattgctaaagtcgagggacttgatgttttgtttattggtgagattggacctttctgtttatggtttgtggaattggctaacgggtttttcctaggacccttcgaccttgctaagcagatgcgtgtcacccgcggtggcgaggagcacgaggctgctatccaacgtgtcttgaatgctgctagagctgcaggaaaaaaggctgctatcttctgtatgtgttctcatttccgatgttccatggctcatgtctaatattgcgttttttaggctccgatggtgatgatgctcttcgccgcacacagcagggctttgatatggtttccattaccaccgatgttgctgtcttcggtgacgggatgctcaacgaattagagaaggctaagggcacttctaaggtccaaggaaagcgggacgggtattgaactgtttcggaattatattgattatgtgtacatataatccacgcaataaattcaactatattatcattctacactgtaaaacgattgctctcctccattacctattattcaaacttccaataaagctttggcttggtcacttctttgtcatcttcactctgtaggcacctggtgtcaccgacttgacagttccattttgctcgacgtcaaaaacgaaaagcgaggtagcaataccaccccaggtcaactggtccagcatagtccagtcgttaagatcgtagaacgaagagaaaagacttgaagaggaaccaactccgggattccgaccctgagttgcagtatatccccggaaagcgatttccccactggcctgttcggagataatagacggcacaagtcgtgacccgacaccaccaaggagtgtagacactagagccgtgatatctgtcccattgctaatccacgaagtgatattcaaaccaggcgcgggctgggtaggtggcacaacagcgagtgtcaatgacgaattcaggtcttcggctttgtatgtgccggcgaacttctgcactgcctctgctgcggcttgctccataagcgccgggagtatagcatcgacaataaggtcgatcgccaagagcgcctcgctgctgcggctggattgcgtgctggctgagaggagagtgaagccggcgtcgaagtccggtatcacgaccacgatgccaccgtagtatcctgagtctccgagtttcgtgtatagatcagtgaccacgcctgatcccgcgtggacgtatcgatggatctcccatggtgagccgaccgagtagcgtaaacttgaggtgtgagtgattggcttcatccattcccgtgtcttttcggatggaaggagggtggaattcaagagggctacaccaagcttggaaagatcattgattgtagagaataatccaccagagggggttgtagcgcctccatcagggatgaactgctcatcaagagcctccgatgtgacggaatgagggcgggtggagttgccaggggttgacgagtaagtggacttcaatcccagaggttcgaagatcgattcactataccattcgtccatggtctttcccgtgagatttgaaatcgcgagaccgaggaagatatagccgccatttgcatactcggggctcgtccagggaaggtaaactgggggccttggggcgtatgccacatcccaagagactggattgcagccctgggtctgttcacccaagcaagatggccataaggatatgtcactcccgttcagcggtgggagaccgtagaagtttggatcagtcaacgcgggattgtgagagtgttcgagatacttgtatagaagaaaggtttgtaggaattcttctgtagcaccatggggtatgccgctcatctgacccgcaagggatttgagggtgactttgtcccattggacatcataaacaagccggaacttgtcatgttgcttccgaacacgctcggccaagaatgggaagatgtcggtaagtggacggtcccagtcccgaggtttcagctctataagtccagcaaggactgtgaagagtttcgacacactggcgaccttgtaaatgctgtttccatccaccttatttaccccaaccggggagtttgctacctcactggcggtgtgatgtaattgaagatctttggctttcgggtcaagcgtggaaaataacccagcagagaatgtgaggttcttcagcgcaaagactccactgcttttgttggcctggttatcggcgaggacggtgttgagttgagaagttaggttcttccaactggcggcgactcgactgtgattgctagacaagtccctaggaggtgggtatgacggtcctagaaggttggcaaaagccgctgccgggaggcaaagcaagccggtgagcacgtaattcggtcgcatggtgcttatgagaaagaattgctgaattattccaaaaagtaggttgatgaattagattgaaatttcaacgaatgctgcacgtcggcctggtcttatacctccttcaaactgccatcgaataaggcgctacgttcattctccatacaaggttatgtcatatttagctccgtgatatactacctgggggccatcaaccaggatctcaatctattggtgcatccatgtcgtggggtacctcgatttggtccgttgtaccgctctgctggggcaatgacacgatgagccgctctagtttgctgcgttgaaccatttctggaagccttgattgatgatccttgaggcggtgtcattgtcaattctatcgatatatgggtgttcttcagcaatacgaaccttcgtgctcagccaaagccactgacatcgcgatgcatagggacactaaacccgatcgggtggcatgcggcgctctatgtcttggcatttatgcttcgatgactacgcggaaaccgacctgttgcaacgtgccgacgcatgtcttgcccaccaaaaagatcacggtcatcacaataaacatccagataggcttggttgagtcgtcatgtacatccccgacccaactgcccatgtggtgcttgcgttgttcagcgccattgttggttgagaagaagcagtcaaaggaccaaaatcgagagttccagtagaattatcatgcgattttctctggtaggagtttaagatggtgtgaagaggttgaaaaagcaagagaatggatgtggcctggatagctttcctatttaggcagtcacgagctgagcacatacttacggcaagtaccggttctttcaaagttccctgcgtatccattatgctaggaacatttttggtgtcttatttcttatcttattgctggtaacttaaagggcgattcgaattataacacgggaccgctctcacgcgcttgcgtttgcccctagttttcgcggtggcaaagatgccggattatccatagagcacatttcagtagcactctcatcaatgataccttcacaggtcgggtcgtcatagcttgttaaaggaatggacttgacgaggcatgggcgttttggatgcacgttagaagatttggtgtagcgtgaattcagtcagattagttattcatttgctatgagactgtcagggccagttgagcgagtagctatgtgggacttggagggaccaattattcagtaatattcagtaaagaagaagggagagatctctaagattggaacatactttggggtgttggaggtcgcctctgcagtctcacaatagctcctttattgattgcatcacataattgtagaagatatcggagaactttcttgttctcatctttctccttgatctataacagatcgagaacagccaacatctattgattaatatcaactctctgaccggcgacatcacatgagagtagaatgcaggctttgaagtgatgttgttttggctcaatacgacgaaagtagcgcgagtgagagtgggcgttcctagagaggacatgtgaagccactatcattatcgaccccggatttgtatgatgtctgtcaagtgtcgattggacgatatgtattagctgctcacatgttgaccgtctatttgagactttgagccatgtcacattatatgacccagtggtcccatgcaggccctactacttactcctttgcctaggctctggtttcaagttatcatatatggccttaatatctagtaacacccaagtgacactatattctaagctttgaatctaagctttgctaagcctttgttgtgctaagaccttgtatgctgcctttgaccgcccctctatacgcccgacatcctttgatcctttcaggtttcatcggtgctccccaaaagcacggtttgaataatggcctcttataggagttgctgttcagactataaaggctgctgttttcgtccgtagacaacgatttctacacaaccttcaaaccctttcgccacaggtcaccactagccatggagccaagaccaaccatcaaattcaagttgaatggagtattgagatctggggctgaaatcgatgacttggaactccaagcttgctatcgcgctctcgacaacctgcggagcttattgtttcaagcaccgatgctggaccttctgagagagcaaatcaaggaaggagaccgctatttcgaatcgctgattcgagcctctcgggggaaattcagagaatgcagaacatttatgaaagtggccggtgtctcggcgacagagttgagaacactctgcaaccgctggcaactctccaaacccctcgaagacatggcacgaaggattgtattcccaacgcacccagagaactatgcgattatgcattccccaggagctcccgtcagaagtgggccagactgtggggtggaggtcatcggggaccacatggcgaaggttcgatttgtggatctcatggtaagcggagagattcccaggtggatgtcggcgcagcgagatgacagttatgaaatggcggagtacttggtcgcgaaacttgagagtgggagcaagtttttctatattatgaacgaattcatggataccgagggtggttgcaggatcaagctgcgggcctttttcccctctgcttcgccatggtcattgatcaatcaacacgccgagcatcttgcggtcgagtttcgaaatcttctccgaatcgtccatgagacccttgaggaacttgaagacagctattgaccctttcccgaccgagacagacatcatcatcgccggacattagtacatatcatggattattccaagtcgtcagttttgtttctcatatagttttctgcaatattagcattattggattgatttccatggttgttccaggtcattatgggggagacgcagtagctcatcgaacttgtaagacgaaccagatccctgttcagtgattcaagtagttctcaaaaaccgcagtaacagccaagcagaaatacttctaacattgtgagaccgataaaaaaagccaccagaagtacagccaagctgaaggatcggctttgcatggccacaattcggtccgcggggaagagaccgaggattggacgattagatcaggggaactccacgacctttgagaatcagactcagttttcaacacctgtaacttgcagtccaaagcgaatgctaggcttgggacgtcctctattgaaagcgcgggcatcattgttggatctgataaccgcaaagaatacgttgacacagccatcaccgcccgccgagctgccaccgcttccagactcgccctcctcaactaccttcacccactctgtgtctacccattccacacagtcttcttccattatgacttcagacgattctgagaaccatggctcgatcttttcggtctccggccctgtcgtcgtggccgagcatatgatcggttgtgccatgtacgagttggtaggcagccccagctccgagatggtggagaaccccagatactgaccgcatagtgtcgtgtcggtcatgacctgcttgttggtgaggttattcgcattgagcaagacaaggccacgattcaggtctacgaggaaacaggtagagctccgcagcccccgtttgatcataccccctcagagagctatgctgaccgatgtcatctttgaataacagccggtttgactgttggagacccggttcaaaggacaggaaagcccctttcagtcgagcttggccccggtctgatggagacgatctacgacggtattcagcgacccctcaaagccatcgcggaccaatcgaagagtatctacattccccgtggtatttcggtcaatgccctggaccgggagcgcaagtgggaattcaagcctactaccttcaaggtcggcgaccacatcactggtggtgacatctggggtagcgtgttcgagaatagtctggtgaacgaccacaagatcctgctgcctcctcgtgcacggggtaccattacccggattgctcctgctggcagctacaccgtcgaagagaagctgctcgaggtggagtttgatggtaaaaagtccgagttcggtatgatgcagacctggcccgtccgtgttccccgcccggttagcgacaggctgtccgccgatgcgcccttcattgtcggccagagagtgttggatgccctcttccccagtgttcagggtggtactgtctgcattcctggtgccttcggttgtggaaagactgttatttcccagagtgtgtccaagttctcgaacagtgatatcatcgtctacgttggctgtggtgagcgtggtaacgagatggccgaagtcttgatggatttccccgaagtacatgcccttcccaaacttactgcgataacatgttactgactgcatttctttcccagctttctattaccgtcgaaggccgcaaggagcctatcatgaagcgtacctgtctgatcgccaacacctccaacatgcccgtcgccgcccgtgaagcctctatctataccggtatcactatcgccgaatacttccgtgatcagggtaaggacgtggctatgatggccgattccagttcccgttgggctgaggctctgcgtgagatctcgggtcgtctgggtgagatgcctgctgatcagggtttccctgcgtacctgggagccaagctcgcctctttctacgagcgtgctggcaagagcagtgctcttggcagtcccgagcgtgtaggcagtgtcagcattgtcggtgctgtcagcccgcccggtggtgatttctccgatcccgtcaccagcagtaccctgggtattgtccaggtgttctggggtctcgacaagaagctggcgcagcgcaagcatttcccttcggtcaatacctccatctcctacagcaagtacaacgcagttttggataagtactacgagaaggaccacccggaattcccccgtctgcgcgatcagattcgtgagcttttggccaagtccgaggaactggaccaggttgtccagctggtcggtaaagcggcactgggtgattcggataagatcacgctggacgtggccagcttgctcaaggatgatttcctccagcagaacggatacagtgactacgatcagttctgccccttgtggaagaccgagtacatgatgaaggcgtttatgggctaccacaacgaggcccaaaaggccattgctcagggtcagaattggaacaaggtccgtgaggctactgctgatatccaaagtgctctgcgcggcatgaagttcgaggttccggaggacgaggcggaggtttcggccaagtacgagaagatcctccagtccatgactgagcgattcgcttcggtctcggacgagtgaaagtgacatcttaacttagcacgtatttccttttagatgtttgttcgagcacattcccctgtagttattgtgtccaactcgagttactttttttccattatggttgcttaacggtataacttctagatgtacatgtggcccgtacgcgtcaggcagcacaagacatgcgcacatgacccaatatcggatctgttaggttatttggcatgttgaaatagtctctttctttaggatatccggcttataacactatatacactattcttcactcgtcagtactttgattgtagcctaggccgacagaccgggacgccactacatcaccgccttcgtgagccaaacaatccctccacttacaccgtgcacctccccggttctacttcattcgacttctctgttgcctcgtttttcttgctttttccatattccttgcctagaagcagttttccgtatcccaaatcgccagccatggcaagccccacgaccggccactcgtgcgcaaacccctgtccctttcctatgcggtctggctaatctccgtgcagcataaatgtcaatgaccccagcttgatttcgctggtgaacaagcttcaagatgtcttttccacagtcggtgtatgtatacttgatcagaggtcacagatcaattgtgattacaggggcaccatgtgcgctaacaccgctactcgttttaggtgcacaacccaatcgatctgccccaaattgccgttgtcgggtcgcaatctagcggaaagagttcggtgctagagaatatcgtcggccgggatttgtatgttgcttgttttggggagcttgcgcggccccgtgcacgccctcggtggcggggcatgcgccatatgtgaataattgctaaccaagttttcgccttgcagcttgcctcgtggctctggaatcgtcactcggagaccccttatcttgcaactgattaacaaaacccccaccacgaacggggagaccaagttggagacaacggacagcgagtccaacgtgaacgagtacggtgaatttctacacctccccggggagaagttcttcgatttcaacaagattcgagatgaaatcgtccgcgaaacggagaccaaggtcggaaagaatgccggaatctcgccctccccaatcaacctgcgcatctactcccccaacgtcttgaccttgaccctcgtcgatctgcctggtttgactaaggtgcccgtcggagaccaaccgaaggatattgagaagcaaatccgtgatatggtcctcaagtatattagcaagcccaacgcaatcatcctagcagtcacctcggccaaccaagatcttgccaactcggatggtctgaagttggcacgtgaggtggacccggagggtcaacgcaccatcggtgtgttgagtaaggtcgatctgatggatgatggtacggatgtagtagatattctcgctggacgaattatccccttgcgcctgggttatgtgccagtggtcaaccgtggccagcgtgacattgagaacaagaaactcattgcttatgccttggagaacgagaagaacttcttcgagaaccacaaggcgtaccggaataaggcttcctactgcggtacgccgtatctggcacgaaaactgaacttggtaggggttgaccccaatcgtctatgaaacctttggactaacggacttcctatttttagattcttatgatgcacatcaagcaaactctgcccgatatcaaggcccgcatttccgcctcccttcagaaatacaccgcagagctagggcaactaggtgactctatgctcggcaacagcgccaacatcatcctgaacatcatcactgagttcagcaacgagtaccgtacagtcttggagggaaataaccaggagttgtccagcatcgagctgtccggtggtgctcgtatttcttttgtgttccatgaactctacgcgaacggtgtcaaggctgtcgatcccttcgactttgtgaaggacattgatatccgaactatcctttacaactcgtccggttcttcacccgcactatttgttggcaccaccgcctttgagttgattgtgaagcagcagatcaggcgactggaagagcccagcttgaaatgtatctctctcgtttacgacgagttggtgcgcatcctgagccagctcttgaccaaacagctgttccgccgctaccccatgctgaaggagaagttccatgctgtcgtcatccaattcttcaagaagtgccttgagcctaccaacaagctggtcaaggacttgatcaacatggaatccacctacgtgaacaccggccaccctgatttcctgaacggacaccgcgccatgactctcgtcaacgagcgtcaggcagccgccaagcctacacaggtcgaccccaagactggcaagcctctcctcccagcccgtgcccagagcccctcgctcgacaccagcggtgaggccaataacaacagtgggttcttcggcagcttctgggcttccaagaacaagaagaagatggccctgatggaggctcctccggcaactcttaaggcttcagctagcttgtctgagcgtgaagccaccgaagttgaggttatcagtaagtggactagctcatgcagaacgcgtgtgatatttgactaacactcacgcagaactcctgatcacttcctacttcaacattgtcaagcgcacaatgatcgacatggtccccaaggcggtcatgtacaccctggtccagtatgtatcatccccaatccctttcgtcgagtatactaacaaatgattttcctaagattctccaaggatgagatgcaacgcgaactactagagcaaatgtaccgcaccaacgagctcgacgaactcctcaaggagagcgattacacgacccgccgacgaaaggaatgccaacagatggtcgagagcctgggtcgcgccagcgaaatcgtcagccaagtccagtgacgaaagagtggacttggtcactagacgatttatccctagaggaaaaaatcatcccattgaccgctacgttggtggagttgggctcctcgcatctctttgtgatttttgcaacacgctccgaatatcttgactatactccgtacttgctttgctgttcctaccatcccttggttagcgacttgttccgttggtccttgtttagatgttgatccgggtggttcgggttcggatttcggattttcgtcttctttggtttcgataagagggagttctttgcttcaccttactacatgttttcttttctttttttcccaatttgagagctctataccgttttcctttctcattgcttggtctgttgtctgcgtttgcggacttcctgccacggacgcccggatgattgtatcaattaatgattctgtctctgctttatgacttagcttagaattcaaatgttgacttttcaatgttttcatcatttacgttatagttcatatcagtacatgcaggggcggtaacttttgagacgtgagaaagctacagtcaacaagaatagtgccaatacgatttggatatccaataatatccgcgcgagcaaatgctagacaacaccggttttttatgtgtgggagatgagaaggtgattatgaagatgatgatgtccttcattctttatttccgcagtttgatgtcgcagaagtgctttaaatacataaaattggaaattctttccagtagatacaaaacaagttgagcaagcctccctagcgaacggcgaccgtgacatggacgttgatgatgtccatggaagcaatgtatgctagaccagtttgtctttcgagatgacgagcttccattcaatgattccatgaccgcctgccaatggtttcttcggggtgtggatgattcttggacatatttccttggtgcctttttcttttgtgggttatggctgtcctgcaagtccacggtggtgaggagtgttgtgggcagagtttgatgtgggggggggggggtttttcttgttttgatctgtgccttgggcttagaattgtcagcattattgtcttgaacggggctgttgtgaaccaaggcttaccatactcatgattctttttcttcgtgacacccgttgcgtgagcatgaaggagggttgaaaatgacagagacaatgccttcgatgtatttgtgaagcctcgaagttgtcagagagtttgtggttggtcatgagtagtttcagaagagcttgatagttggcgctccttgtttcagtgtgccaacccagtctagtgggaagtgatccagtcaagttcaaaagtcgatgtcaattgatgccgtgcgatgaacagttgttgaggctttgtgtctcggaggcgggctctttagtaccgtttcgtggagaatcaatgtggtcttcggtattgggatttgatgtgacccaaaggtggaggtattgagaggctggtggttgtcgagtgctgggaattgactggatgatatgcactgacatctctatactgcaaccttgcgagaccactcttgtcggctttcactacttgatgtcaactcacagtgggcagcatcgatataccagaatcaactcgcagtggacagactgatataccagaatcaactctaagtcccaggtaaattaggaacagtgcaccccctgagcatacaacccaacacgccgcctattggtgctgggaagtatggtgtcagaggatgatgttcctaattcactcgtgagcgtcgagaataatggttcttcagtgctgccacggtcccaagtaccagaaacatggatcccttgatcatacaacccaacacgccgcctattgttgctgagaaatatggtgtcaagaggatgtattccgggctcacttggcggccgtcgaggataatggttcttcatgctgccacagtcccaagtaccagaaacatggatcgattgatcatacaacccagcacaccgcctgttggtgctgagaagtatggtgtcaagaggatatatctctggctcacttggtgactgttgaggaaggtagtgagggaccggcaggaggtggtctgcaacattgcagcaagttgatgggtttccgcattggactgggtggtgggatgaccgtatgagatgggattgagttaagcaggaagttattcaaattatcgaggatctcgtgggttggtggtgactggtgactagaagtgttagcactggcaaaagcgaatcacaagttgggagacaaacagtcatgtcattgcatccctcttcattcaggtggaatcatgagctctgctggctgggctatagtagaattggaagtgtcgaaagactccagtggaatcatcagggaactgtgattttggaagtcagccttgcatctcaagagacgatatttctgatctcaccaaatccctttctcttgcgaagatcaaaagcaaccaattttccatcccttttccttgttccttcattttgtcccgtctgatgcaaatccatttcctccttcttttcccttcttttgtggtttgtttctttccctcttttcttttctttttttttgtagctgctgttgtctgggaatgatgatgatgatgttggttgtttctttttcttttctttctttttcgagctgagcatcaggcaattgccatggggggttccattcggatgcaaacgaggtttctttgcgcagaggtatgtggtcaatgatgaatatatggatgttgcggtggcagtcaggaggcatttgccggtggagaagtggaggcagccctgttcggtggttggcatgttgttgtggctgttcagaagtgcagaaatgtgtggattttatgtaagatgtgatggtcatgcacagtaaatcaatgaagtggcgggcacatgcaacaagttgcgaggaaggcagattgaaaatgagagacgctgttcctgtggcagaaggcaccaatgtgaacttgcgtcagccaatggatcggctggttagatcttccactcatcattgcagagcagaagaaacagagaggtgagaagggttcgaatgctcaatttcttacccggatatttgcaaactgcaatccaggttgctgttcgtgatgggtggtaggctaaaagcagcaacatgtaaatgatatagcgtttgaggcaaagcctgtttcaagctgcaagggtttgttttgattccacatctatcacggttagtaccgagcaaggatggaaacatagtgatatagtgatggaacaatgttgatgaaaggccaagggatgacatggtcaagtcaagatgggttaggggagaggaagaatatactcacaatgcacagcagagatgcaagatcaaaagccacagtgatgaagcccatagggtgttaggtctatgagacaagtaagtgcatgtcagtgattgaaggatggtgacaggtggtaggcagacttaccttagtggacatgatgtgccacgtgagtgtgggtgttgacatgacagatgtgacagtcgcaactggcagtcagatatggtgacggactccatttccaatgaatcttgatgcaagatatgatggaagatgtgatgtggagtggacaagatattttgagacccaagctgatgatggaatgtacttggggtgataaaaccctagatggaagaagggggattgatggaatgaaagatgaggaggatggggagttgaagaagagagaaatagtaaaggaggggggggggggggggggtttnnnnnnnnnnnnnnnnnnnnnnnnnnnnnnnnnnnnnnnnnnnnnnnnnnnnnnnnnnnnnnnnnnnnnnnnnnnnnnnnnnnnnnnnnnnnnnnnnnnnnnnnnnnnnnnnnnnnnnnnnnnnnnnnnnnnnnnnnnnnnnnnnnnnnnnnnnnnnnnnnnnnnnnnnnnnnnnnnnnnnnnnnnnnnnnnnnnnnnnnnnnnnnnagggggggggggggggggggtgttatataggtaggaaatgtgactcgcttaggaaggtactttccctatttgggaagggacaatgggagacaatagaacccgtgggggccttcccaattgcctatggtcatatcaggtgatacccaccagccgctagctgcttcttcatgtggtattcacgacctggtcaggtacatgaaaccgtcttctagtgggcatccttgtagaaggtatgaagaagtgtagctttcaaactagcattcgtgataagccaatgccgatatatagcccagaattgatgctgtaatcataatcttacagtgcaaagtagatttattccgggataagagtagtcgaccgcttatgcggccttgtcatgacattatggtagtcttcttagatcttagtctctttggatggttttttctatatatatcatccccccattcttaaatttttctaattaaacggcggcaaaaagaagggaaagctcaatccacgtagacaactttctagacctttgatctatgaagcctcggggattggagataagctttttgacgccagactgtgttcggaatagcggatccgcccgtcatggcgggtcaccacctgggcaacatccatggaatcatctaatatccttgatgttgcgtcttttttggttggctttctggcttattactggaagtcgcatgggtacaatggtcgggaaaagtaagagaagtaagaaagaatcagaattgaccaagctctactttcgcccggtatgccgataactatagtgccaatcctctttcttcaggtcttgtcgcaccttgtaattcctctctgcagcctcaataggccccatatccaaatcggcaacgacgaatccctcctcagtccccatcttagcaatcgaacccactagagggagcgtaatctgcgataggcccaagaaatcctccgacggcccggcggcgttgacgaagacaataccacaggtattctcaaagcagcgggatgtaatggtcgactcgaggaagagggcttcagaatccgggttatacgcgcgagcttcgggagaggcgtcgtggggggtccctgatagaagtttgagttagatcagtgaggtacaggctaggaaaaattcaacatacagtatgtaggcacaatcacaatttccgccccgtcgacgatcagttcccggaatgcttcggggaatgccagatcccagcagatcatcattcctacgcggccgatcggggtgtcgattgccacatggggctctgaccctgaggaagtgaggtagggtcgttccgggtgccagatattcttcttgcggtaggagccgagcacagtgccatcgtttgagatgaagtatgctgtgttgtagagcagggttgattgatcgggccccgtgtgcttttcgatgattgtacccggtacaatacagatttgcaatttcttggccaggcgttgatagttcgctaggtactcggcggacttgccggcctggactgtccaaaggggatctgtggggaccatgccgctgagatggtatctgattgactcgaatcagccagtgttcatttgttttggggctatccagtgtcgtcagacaggaagtctaataacacatctcttactctggaaggacagctagctcggcgccctgagcagcagcctcactgatgtagttgcatgctgtcgcatgattatactcagggtcaagctcctgcgatactgttagcaaatccgatcgcaattgcatgtcttcaatggttcgaagctcgggtacagcccaagtcgatgcaccgaccttgatatgccattggattacagcaatgcgatgcgtagaggccattttatgtcaattctacaggtacaggaagcgattataatggagagaagaaaaaaaaaacaaactatccatggtcatccactggctaccccaacgagaaattggggtcaatgacctcaacaatcccaccccgccgcgatcaaatcgtctatccaaaaatcaacatatccagtataagaatagtcggtcgcgtatgaagcctccgtccttgacctagctcaatgtattgatctatttgacttaagatgagatcggggacttcgtttgccacgaccttgggctccgaacttggcctggtggtcccattaaccactctccctcagccacatccccatccaatatcggaactaaaacctccccgcttcgttcatcgacagcagcacaaagattctaccccgttcactatttctgcatccagagggataaccggcgcttcgccatctagttcccccttgatcatgccacagcctgacgcagcgccatcttcccagtggcaagaaagcattccgaattactaggccatcctctctgaccgccgaaacactcgcacccacccacccacaacctaagactcgtttaatagaaaaatacgattcctgcggcgtagggagcctatctactcccgataggtgcgccggccgtagcgaaagaagagtcgcgatcttcacgcagcagctgggcgcttccaacgctcaccatatttacgctagacgaagtgccctagatctaccttgttttctaagttttccgggttcactggggcagcagagacggaagaagaaacagctgcctctcccacacgtgaaattcccacatacaatatagctagaaggatgatcattggaaatggtaggaagacatgccggacacactttacggcaatattctctgtacgaccaagggaaataatccttggccagcgagacaatatcggcgagtaaaggaggtacagatacggagtatagtggagtacccgagagacatccctgaaaagtgaacaccttgagaattgatattttcaggacaaaataagtctgtcatacccctgaagttgaagccgagatgagtcaaacagctgcagtcccaaggtaaacaaacttcaaagtccaattcaaaatctgactagatcttgcatactgcttatccgcacttctgatctgtcaatacttcgtagtagggcttagatcttcacggaattttagaatagcctggcaagaatgctagccctaggagattagaagtccgaatctttgtgaaatagatgttatgctgctatcttggcaggaaatcggctatcttccactacgggtttaggaatgacctagatatactcggcctcgggggacatgctttagtacctgcaaaagaccaccccttcaaataaagaatgtcgggccgcgggtgccgcttaatttctctcgtttcaaggatatatatgggcccctcgcatttctttgtattcttgtatctcctatcagcaggtttcggtaagaatgcaagtaagaaggcgtaagacacgtcgatgaatgattggagataacaccttccactgccaagtatagggcggctgtcctacgggagatggagaatgcaggtaccaattagaagggggaaatggactattgatatctcggtagccctaacagcatagggggaatcctgctaggaacggcccacggcatagccggaatgaaaagcgggccgatctagaacatccctttcatattagacgatggtggacaatcgaattgatgacgatggccgagtttcaggtttttccaaggttgggatatatgcgatgccaagaaaaaagcatagccatgatcacatgtcaatgcgccgagacttgcatctattcagggatatgtctatatcgcatatcgtacatgcagcaaggcagtgaatcccgatttttgaatccgtccgagtgaaagcttatcgtgaaatggaggtgggaagaaccttggaatccactggagctctttgtttattttgatatatattcgattgtgatatcatctgtatactattcccaaaacaatccaaggtgtctacatcgccaaatctagaaatacactttgcttcgccacaaaccgacaaagacggacaaaagggatcgacagaccacgttttctgtggcagatgacagtaccataccgtactgtaagattcccgcatgcgtgatttttccatcgcagctattaccatttcctttttctcaattcgaccagttctcttattcttccccattcatctccttcctaccttccctccgctatgcccgcgattacctctacgcaaaatcgtggctcaatgccacgcggctaagagcggcctccccccgtctcttgcacgaaacctctccgctcggtagcgctcgacgggaccacatgtatgtatcgcgaaaagccaaactcgagatgtaaaagctaatgatgcaataggttggaaaaattcccctcctttcgagagcaccccgtctcgacatctccccctttgcggccagtgccagtgctccctgctcggcaacggtctggccgcagtccgttcaatatgttctcggattctctccaccgagcgatagcctacaagaaaaagatcccgattctaaacgaactgcacctcaatttcatctttctccactatgtctacatcatatcctgggttatcatcggctcggtcatcgtttaccccggtggcaacctcgactacatcgatgcccttttccaatccgctggcgctgccacccagagcgggttgaacacggtcaatctgaatgacctccggctttatcaacagatcgtcttatacctaatgacatgtctgtgcacaccgatcttcatccatggcgccgtggtatttgttcggttatactggttcgagaagcgcttccaacatgtggtcagtgacgctcgggcgatgcgacggagccgatcccgcatgggaaccgtgaccgatgatgggcgtacccaggagaataatatcaatcgtgcggagctaggagtcagcggtcgacccatcgtggtggtacgggaccatttaggggatgcccgagacactcgagtaacggacccggctagcaagaaaatcaattcgggcatgaacacaccggaactccggggaagcagtgttgaatccaactccgaagaaacggatacaagcagcgaacctcgttttggcctcgggagcttgaaggtgccaacccatttgaaccccgaacaccacatcgccttcttggaaaagcagcggaaggataaaggagcgttgcgcatcccgagtccccgggagtatgaccgtggtggtgcgcctgaggctttggaagaagacgtggaccatgaggagcaccctcagaatttgagtgaccatgacagccaacatagccccggttcaagctccgagcggctcgatcgactgggtccacttgaagaacagcacatcaccatcaacgaaccagatatttcacgatcccgtggtcgcggtagtacgttccctcgtctggatactcgccctactttgcgggagactaaagatgggaatgaggttaccacccttggcggtgctaacgcgaggaacacattcaggcaggtgttccggtctctgacgcaagagcgtgaccattccacccaaccatatctcagttggaatgcgacagtggctcgtaactccaatttcgtcgatttaacggaggagcagcgtgatgagttgggcggtatcgaataccgtgcactcaagacattggccgtccttcttatcacctactacgtcggctttcatctcatcggcatggttagcatgatcggttggatcatgacagacacccattggggagatatcgtccgggctgatggagttgggcggccgtggtggggaatctttaccgctgcgtcggccttcaacgatttaggtttcaccttgacacctgactcgatgaactctttccaaagagccattttccctctgctcatgctagggtttctaatcatcatcggcaataccgccttcccatgcatgcttcgtttgatgatctgggtgctttccaaattcacccgccagggctctgcgctatgggaagagttgaagttccttctggatcatccccgtcgatgcttcactctattgttcccccgtaacgccacttggtggctgtttggcattctcgtggccttgaacggcattgatctgatcttctttgtcatcctggatgtgagtttgttgtctccttctcttgtgcgacttccactgaccatgctttttagctcaacgattctgccgtcactatgctgccacccggaattcgagtcgtggacggctttttccaggctgctgcgacacgaacagccggttttggaatcatcagccttacagaccttcaccccgccatccaggtttcctatttgatcatgatgtatatctcagtctttcccatcgctatctctatgcgtcgaaccaatgtctacgaagagaagagtttgggtatttacgatgccgcagaggatgatgatgacgaagagacaaatgcccccacatacatcggagctcatttgcgacgccaattgagtttcgacttgtggtatgtctttttgggcctgtttatcatttctattgcggaaggtggaaaattgcagaagaacgaccacgctttccagctgttcactgttttgtttgaagttgtctcggcatacggtactgtgggtttgtcgtttggatacaccggcgtcaatacctccttctcggcgcagttcaatgtagtctccaagttggtgatcattgctatgcaactccgcggtcgccaccgtggcctaccatatgcgctcgaccgcgccgtccttctcccctctgacgctctcaatcgacgtgaggccgcagacggagagcgccgcatgcgccgtcgcgcatccaacttcagtggagttgggtctttcgcccaatcgcaatcgcaatcccagtcgaggaacgatcttggtcattcttcgggtatggacagccacgactggcaaacccagcctactcccaatgcagactctgtgatacatcgtccctcggctgtccatcgttcctcaactgtccaatccgatcggtagaaacgggcgaaaccttcatattcttttgttaacacctattagaggcttggcgttctacatacatatgccctggcggttcaatcttaatttcaatgtacacataattatagaaatattacttcctttgctgatgggataaaacttagccttgtgaccaatataacactgggtaattgtgatgtaatatagaatgtattccgtccgagcagcacattggtttatatgtccttgaaccttgcatggccgtactagtcgatgtagggcgacgaccaagcagactaggccatttatagtgaggtgatccatggatgcacaggcgggaaagatcggcgcttttccattttaggaacagagtaaatatccatgacgacaaactcgatagcttttcgaggatcaccagggtgtaatctaggcagtagagcatagagcccaactcatctccaaatccaactataccaaatcctatatgcagactatatcaatcaacatggacaaccaacagctaccatatctaaacggcgacagcggggccaacccgagcgaccccactctcgagctcaaatccccaatcatcaacagccaaccagacggagccggagacaccccagccaactctcgcccctggtataacccactcggctggtcactgctcgtgaaactcctcgtcagcacagcagccatagtaatcatcctcctggttgcaatcctagtcccctaccaaatagtctcaaaccgctacccaaactacatacccttgaactacaccctcgccgacacctactccggcccaaacttcttcgagcaattcacctatttcacagacgaggacccgacaaagggcttcgtcgtctacgtcaacaaaacaaccgccggacacctgaacctcacctatgcatccgagacatcggccatcctgcgcgtcgacgcatcaaccccgaacacccgttctggtcggaactccgtccgcatcgagtcgaggaatacatacgactctggcttgtttatcttcgatatcattcatacgcccttcggctgtgcgacctggcctgcgttgtggttgaccgatggctatagctggccgacgaatggcgagatcgatgttcttgaaactaccaatatcggcagtcatgggaatgaggtttcgatccatactacgaaagggtgcaatatggatgtcaagcgcaaacataccggccaggcaatctttaagaattgcgacaattccacgaatgggaattccggctgcgcggtcatcggtgatgagtatacttacggagaggcgatgaacaaccgtggtggaggagtttatgcccttgaactccgcgacgccgggatccgcgcttggttctttccgcgtgtagctgtccctgctgatgtcgctgctgggaatccggatccgagtagctggggcgttgcgctggcggatttcccgagtacgaattgcgatattgcgacgcatttcaagaacttgagtatcattgttaatatcgatctctgtggtgaacttgctgctcagaagcagttttatgagactatgtatcattgtcccgcgacttgttcaagctttgttgcgaataatcctggcgggtttgttgatgcttattgggagtttaatagtttcaaggtttatcgtgcttattgagattagaggatggttgaaggcagggttctttttggcctaattttgctatttgctgggtgacatgattgggttgatcagaagcaaaaggaatgttttgtggcagcatgtctttttggttgtttgataggcttttgctgaaggagtttggtgtcgggatgtaccgtacgagcagataaatgatgacttttctttcgtgctatttgtattttcagtctgaatagcaaagcgctattgcataggagatcgacacaagatcagagatagtcgagacctactgcactcacgatggggcacgcgtagctgaatatcagacacgacatatccgtttgaatgccggatgaaaatagcagtcaatatagccagaaaattgagggatagcatttcatttctgattaaacgaaatcctagatatttgaagctcatgctctcgggtcgtcgctctcatcactgtaacactcctcgccattctcctcatactcattattgtcaatatcgccccaccatccttctccagatacttcgaccgtctcatcgatgcagtgcagtaatttcccagagaggtgtatagcccctccttgccaccagaagttagcgtgaagcggaccaatcagtgccttgaactcttggcagtatggcttgtcctcggcgagatcgaagtactccacgtctgcattgttgacgacgagatttagatcggtgctgatagtgccggaaaaggagtgtcgctctccatcccgggtctggatcaaagcatgtatccttcctttgttgcaggtgagacttcctggagatctatgctcctcgcgtggttggctagcggattctcgattcatcttgggaattgtttggtaatgagcaaggttgggatagaatttggtgttggtcagtccagtggtcttgtgcgttggacgacgaagcgggtggagggatagttctcggcgcgatgtgacaacaagtcagatggtgtgatgactcttctcagaggcttcgctggaaaatgaaagagatgtcagaataatcttggatcgaagtgagaaatgatgagaaatgacttcggaattagtgtcaaataaatgcgaaagatagatattcagtttcacttcattgctaaatcaacataaaatgggtatctctaacaaagatgaatcgtctgtcaaccacaaccggctatcaataattcatctctagatcaaaagacacggaatgcatcaatgctaacgaaattgtactcaacagccagtggcccaagagaccctaggtataccaaaacagaaacccgcaaaaaactcaatcatgatcatcgtaacagtacataagaaaggaaaagaaaacaagatgaatgaaaccactacagctgccgtagcagactgccatctgcaaagggattctctggagacatatccagcaatggccgtgtggcattgcgatcacccgttgcgacaccatgtccggtgcgtggattccaatgactagtagtgctggctgaatgtgccagcaaactgtttgcagtgaactgggcttccgggcttccttcagaagaaatcggggccgcgtatttgtttgagtggtgacggacgctgcgggcagtgttccgccgctgaggtgtggtgtccgcggccggccgtctccaagaagtcgcgggtgggatagcgattcctcccgggggctgatccggaccagtggcagcgtcgatcagttgcatgcctggttggactttcacgccgcgacccttgcccttgcggctatgctgcggtggctcgacaaagactggggttaggtcaaccagaggcttttgcttaagagatggggttcgagtgaaattggatgaatcgggagcacgagtcattgtgttggtccggctgttggggtttgagtcgtggccgggggtatgtgtggatcctccgctcataaagccaacgcctgaaaaggcttcttgcttggctcttttatcgcgatcctcccgttcccgcatagcattttgtcgctgggtgtaggttcggcctaggagtccggatggtgcaaaagcagattctccttcctcgggcgaagagatacctgaaatcaatgcctgtctatcgccgaaaggcccgtccatttcggcgtcgagcatcatagtctgggaatatgaaggtggagggggcacatatccacgaagagtcttcttccgagcaaagtactctttggagcttgtcggcctccgttgatccgagctttcgcgcctcgaagattcagccgaagtctctcgttctaggagtgggacttcgttgtacacatttctcggctcatgcgttgatttcttcgtcccggcgcgctgcacaagtttctcggtctctgctttctgggctgctcctttcttgttgacaagataccaacttctccacttctgtactgcccggtaccatgtatctgcgatagacttgtcgctggtcgagaaaaagtgcagaaagttttcggtcgacagaaacatggatgatttttgctggctcttgattgcgaaacacagcttcttgggtggcttgatatccttgttcagcgcccgagcgctaggaaagtagatgtcatagtcggatatatggcagatattggtttcctcggtatcctccttttttgagattgtcacttgtccatcagcacgcagagtaacataacgcttatcccacttgcgacgacgctgggaatggtaaatatggacagtcactggggatggtggcccactggaggcattcccagcatcgagctgagcgagggcttccacgctggaggggggaataacgatgaactggttctctgcatcgtgtgaccaggaattcataacttcccggacatgctcgtagcggcggaggggacgctctaggccaacttgcgagaaagactccatgagaatgaatctgtccgcatcaatgtcccgagataagtgcttagtggcatctagcaataaatcccggacttgagttgacggggtgacagtgagatccgcgacggcatctccatatctgacaagggcatgtcgctctccggcgttgacagcgctgacaggagcatcaactcctggaacgattccggttccgcccaccccgatgtatcttgggggggactcggttctcttgaggtggaccttggatcgggaaagtttgaccttctggaagaaagacttgcgatgctcatcgttcgatgagtgggaactgtgcggggggcgcgccgggacaggttccgatcggggttgttgcgccgagatctcccctccagtcaattgttccatcgcaccttgtcggtgcacctcacgtgcttcctcttcctcctcatcttgctccgccaaagggcgactagttgcggcccgttcattttgtcgtagctcacctcgctgctccagctgagtccgagcgtagcccgggattgcaggaggaggtgcgacatttccacttgactgtggccgatttcgatgatatcgagaacggctcctcgcgatcgaggggttctgctctccgatgctatgcacaggcgccggtggtgcggccatttcgacgtcgccagttgtcgcacctggcattccacgataccgagagaacatttgaggtagggattgcgccgtggctgtcacactattctcactcatgttttggaaatttctcacttgaaattcgcccccgggggccgaggcgcaagagtttcgtaatgtgtttcacgttctatcgccaggataaggttagcgtcgccttaaaccaaatggcaatttcccgtaatttccttcgggtcgaagatcgaacggccagtgctgcgagtgcgattcgggttcctggaagtgtacagaaggtggaaaacacaattgagacaaatgtgggaaaagtccgcaggattcgactcaacacaaccccagtgctcgcgatcaaaccggcctgttctcaatcgaccattcgcgtttcgttaggggggaaaagcgacccgcaccgatcatcaattgggccggcctaggctggtgcatggggttcgctggctcgtaggaatcgatcgttggatcgatcattggatagatcgtatattgattggactcaccgaagtcacttggcatgcagtagttgatcatcgaggagttggagaaaggagaaacatgattgtccagaagttcaggtgggcaggtgggcagatgtcaggtccctgcccggttggtttggccaaacatttccggatccgacgcgccgcgtgcggtttcacgcgctgtcggagtacaatgtacaatatacgttggcctgatggagtatatatctatgatcgacaggtacggaggactattggcattgtattggcactattagattgttcaatggacaatgtgagattattattggatgatatctacggatccacaggacgatcagatctaagtgtctcactccagacgtgcttgctattctcctttctggttttcaacgggacttggcttttctatatttgatcattcttacaggcgaattgaattcggtcgatcttatttcctataagcacccatttcccggcgcctatgggttgttagcatagacatacaaacaaggtataggtacaccccggggagaacttaccaccacgcaatgaagtccactgttcgcacatcaatcccaagctcagtcaatgccttggtagacagatgtgtatcataaggccgtacgacactcgaattgggatcattgccctgcttattggggatcattccgggaatggccacacccatcaccttggccaacttctgacaaatctcatacttggtcatacggtcctcggacgtaaattgcaggatgtgagggaagtccttccgcttctccttctcgcgcaggtacttgatgacaatgtcccgacacacgcgcgccacgtcctcggtgttggttgggtaccgtatgccccagtcgtccattttcacgccggcgttttcatccgtagcctttgttactgcgtcgatgagggtgttgatcgcgctctccgagttattcttggcggtgccgtacagcaccggcacgcgcagcaccacgcccatgcctgaggcactggtctcttctaatacggccacctcgccatcacgcttcaattgcccgtacagattcggtggcttggtctcggcattggcctcgtatggtgcctcgccttcggtgccggggaagacgtagtcggtcgagatgtagatgaggaaggcgccgcgagcttggcattccttagccagtgcccgagtggcatcgacattgaccttgcgggcttgatctgggtgctggtcacataggtccggggacctgtttgcggcgcctgtgagctgtcagtctatgatggggtatcaagtcagccaattaactagcttacaatggatgacaatctgaggcctaggcatagttcaaaggtgattaatgtctataatcaagatctagatggaatacacatacttgacttcatcgaacagcattcggatatcctcctccttctccaggtcggccttcaagatagtaggcggggcagggcgggtgaatccctggccaacaaccaacacgcccgagtgctggaaggtgttgaaaacagaacggccgagcaagccactggctccagtaacaagaacgttagatgtcatttttgttgtagatatgggttaagggaggaagatggggaggatttcctttctgaaaccgcgggaccaactgtgacgtaactaacttctcccagtggatataacagtgaggacataattaagccacctatgtagacaggcaacacatgtggattcactcaattcgatcaattgaatcaattccagtcggttctgtgctttatacacgttaagatatgccatatgatactaggggtgtgtatatgatttcctatttgggctgccgctttaatcagactcaggctctcagagtagacatcagcacgaactcacagagcagtcacgtgcatgatgacttatactatgtaagacgggtgctcattggatgctcgctgattactcagtggcactctgtgtccaatcagtgaacaactctgatcacttagctttaagggaacagccccacaaggtcgtttatactgtgatgtttagttcgtaggtcaaattatttcaagaattttgcgtattttccttctggcaacaaaagagcccactttgtgcaatttatcgcaatgtccgaagggatgcctcccatatgcaggttggacttcaagtcatttcaagactggaacggcgaccgtccatcacagaccctgatattccacaacaatgactcttcatggtggatcaaagttaccgtggattggtccctgccagaacaagtactaagtctgggttatttgaaacgccggtccgtctttcgagaattccttaaagcgattgattttgtctaattgcagcttttggacgatactgtgacaaacattactctaaacttgaccgagcagagtcaaaactcgatcattatacgggatgggtatcaaaacccagcgaacttcttcattaccgttacccatcgaatgtactgcaagattgcggaagatccaaagagggtcatatacccggcgggaacgatgtttaccaacatttgaggctcgctgtttgcatactgttgaggttatagctccaacagtctccatagttgtgttcgagcaacgcctgtttgcttataaaacgattgaccgccctatctatgagcctgaaggcacgaaccatgtgttaaacgaaattaatgtccttgcacaacttcgcggacttccgagcatcgcgcagctagttagtctagttgtatcagagaacccatataagacctgcccgtcaaccgctatgccaacagtgatcacaggatttcttcttgaatactattccggagggtcacttgagcaaatttttgaggatgagtttcaatttgatactttgccagtacaatgggccttacaaattgggacagccttcaatacattgcacaaaagagggcgaactcatcttgacatcaagccgtcgaatatcgttttggatgccaataaaaatgccgtccttatcgatgtcagcggaaccggtggttacgtgtgggaatggcgttcaacagagatgcaggttctcattcagcaaaacagtgaaacaagtcctgccaacacaccgtttgaggcatgggttgccacggatcgttaggcttatggaagattactttcggctctcgccgaaaaaagtggcacacctgggattggtagaagactgcagtctatcgctgatggtctgaccaaggcggcccccaaatctcgcatcttactatccgacgctctcgcgcaactagatgagaaggcgtagtattcgtccacaagaagcctgaaccctgcgagggtagaaccgtatacatcaactgccatttttttttccatttagccacctaatttcctctatcaactcgaaaaagacacctgatgaccgaagtctgtttctgtttctgttctgttctgttgtgaacctgccatacaggtacaaccagcaccaatctgacatgcccaaggcttattattgaaatatcgccggaggactgctgaggtatcagtcgcgcgggtgttgggggttccaatacggagctggaggctgggaagcaggggagaagggggtctttttgttgtcatcttgaacataaatctactacgaatcaggatactccgtatagaagtcaggatggaatgatacaaacttaggacctgcacgcgactctcttcataaccctaatggggccgagaatatacagccatgatacacctgtccaattttactctgagatcaaaaagcggcaagaggtgagcactaaaacagaaaggggacggtctcgagtgctaggcattatccggtgaatatgcaactatatttactgaatttgtataatattatctatgcaaactaccaattaaacaatatagactgctctaaatattctacaagcattgaatatagaaggccgaaaatccccgagacctgcgagctctcggaggcaaatcggaccatcggagtatctccacttgacattctcaaaattgttcctttttgaaatcctcagccatgtccggtgtcaggaacatcacagccgctttgcggcgggcccgagggccccgtcccagtctttctnnnnnnnnnnnnnnnnnnnnnnnnnnnnnnnnnnnnnnnnnnnnnnnnnnnnnnnnnnnnnnnnnnnnnnnnnnnnnnnnnnnnnnnnnnnnnnnnnnnnnnnnnnnnnnnnnnnnnnnnnnnnnngggtgacagaacccccccccccgcttggcggcgggcccgagtgcctcgtcccagtcttgctattcgcactgtccaatccatcacacctttgactgtgcgcaccttcagcgccagctccactcgctccgattcccgccagatcaagttcaccagcgacgcctaccccaacctcaagcgcgaccctaaattcgctgagatctctgcggaagatgttacatacttcaaggaacttctcggctcccaatcggccgtgatcgatggcgtgaccaccgacgcgaaggacgatatcgaacccttcaacagcgactggatgcgcaagtaccgtggccacacccggcttgttctgaagcccaagaatgcagaggaggtcagcaaggtgctgaaatactgcaacgaccacaaattggctgtcgtgccgcagggtggaaacaccggtcttgtcggtggttcggtgccggtcttcgatgagatcgtcgtcaacacttcccgcatgaatcagatccactctttcgatgctgccaccggtgtgctggtcgccgatgccggtgttatccttgaggctgctgaccagtacctcgccgagcggggatacctcttccctctggacctgggtgccaagggatcctgccagattggtggaaatgtctccaccaatgccggtggcctgcgtctcctccgctacggcagtctgcatggtagcgttctcggcctccaggcggtcctgccggacgggactatcgtggatgcgctgtcgactctacgcaaaaacaacactggctacgatcttaagcagctgtttatcggcgccgagggtaccattggcctcgtgactgctgtctctattcagtgccccccgcgtcccaaggcggttaatgtggcttacttcggtcttgagagcttcgaccaggtccagaaggccttcctcgctgccaagggccagctctcggagattctctctgcgttcgagctgatggacggtggcagccagaaaatggttattgaagctacgggtaacaagcaccctcttgagggtgagtatcctttctactgtctggtggagactagcggttccaacgccgagcacgacatggccaagctggagtcgttcttggagagcgtgatgagcgacggtattgtcgccgacggtgtactagcccaggacgagacccaattccaggccctgtggcgctggcgtgagggtatcaccgaatctctgagtcacttgggcggcacctacaaatacgatgtgtcgatcccattgtcggatctgtacctccttgtggaggattgcaaagcacgtctcacggaaaagggcctggtcggtgatgatgagtctttccctgttcgtgctgttgttggttatggtcacatgggtgactccaacctgcacttgaacgttgccgtgcgacagtacagcaaagaagtggagaaggcgatcgagccgtgggtgtacgagtggattcagaagcgccatggaagtattagtgctgagcatggccttggcgttgccaagcgggagttcattggttacagccagaacgagacgatggtgaagctgatgaagcagctgaagaacctctatgacccggtaagtggagcggcattgatctgtgtgggtaattgctaacatttatttttagaatggtatcatgaacccatacaagtatatttagagctaagtgcaatgttgtataggattggagcataacaaaagtctcggggccgagaagtaataattacattatgcacgagcatgtacgagcatgtccaacgcacaaactcaagtcaaataagtaaatgataatccttccaaggccatattggcaatgttagaggtaaatcccatcagctgagtggaccccttgcatttttaccccagttgctgcctgaggccagccgttgccatgtgatacggagcttgtttagggatggacgctccaccccttgcccgccattcccgatggcttctttactctcgtcttgacctcttggaagtcccaagctattcattcattacttggatgagccctgtcgacattccctgtctgaccggagtagctagctgggctgaattattgcgcgatggacgacatggcaagccactatcaggtgatggaggagctgggaagtgagttgcctaaagctctttttatttgttgcatttccgtcgctaaccgtaatctccgtttgcaggtggtagttttggggttgtttacaaggccattgacaagaccgacggcgagatcgttgccattaaacacgtacgcgctttcatgatcttcgatattcgagtttcaatttgtcacatctcgttcaattgttgaccccttttcagatcgatctcgagtctagcgaagacgatattcaggagatccaacaggagatttccgttctggctacctgcgctagcccctacgttacacaatacaaagccagtttccttaaggggcacaagctatggattgttatggaatacctcgggggtggctcttgcttggatttggtacgttccttgctgctattttatcaggggtttattgctaactcgccccagttaaaacctggatgttttaacgaagcccatgtggccatcgtctgcagagaactccttctgggcttggattacctgcacaacgaaggaaaaattcaccgtgatgtcaaggctgccaatgttctcctttcccagaccggaaaggtgaagctggcagactttggcgtcgccgcacagctagtcaatatcaagtcgcagcgcaatacattcgtcggaactccattctggatggcaccggaggtcatccagcaggctggatacgacttcaaggcggatatctggtccttaggtatcacggcaatcgagatgatcaacggagaacccccgcatgccagcacacaccccatgaaagtgctgttcctgattccgaagaatcccgcccctcgcctcgaaggaaacgactacagcaacacattcaaggacttcattgcacaatgtctgacaaaggacccggatttgcggccgagcgcgaaggagctcctgagacacaagttcatccggaatgcgggcaaggttgagtcacttcaggaactgattcatcgcaagcaggactgggatgctggccgtggtgaatcgagagacgtgaaatactatgccgagtctctcaacaacatgaccaggccggatgatctcgatgaggacgattgggtctttgatacaatcaaggctcctccaatgtggaagcctaagggcacggattggatgacattcgacgaggaggaggaggcaatgcctgatccagcccagatgctcgaggacttgcatataagcgcaccgccgccgcctaggcaccaggctaactctaccgttcgccgagttcctaccgaccggtctccgtctgtcaagcgggctaacaccaagcgtcgctcaagtggtgtcaaacaacctcttggtctagacttaacctacggcaacagcccgtctacggtcagacagttccgccgggtgtcagacaaagtccccactgatctgaacccagccaagcagggctatgatgagaatcaaagcccgaaaacggtgtctaccgatacttcaagcaaggaggctcagattggacgacgtgcctatagcaaggcagtgggaatgtcctgccaagaagtcctgtcaacaacaggagatggtgacaaacgtgaggcaatctccagactcgcagaggcctggagcgacctggaaatggtcgaccccgaaggcctctaccacatcgtcaggatcatgaacgagaagatccaagcagacccccgcctctccactcttctcccacctacacagcccgattccccctcgcggccacgtctcctgttggcccaaaacaacccacacctcaaaagccaccgtcgtcgccaatcctacgtccccgaaccccaatcccagtcgcccccatccatgcccgctcaagctgcacccggtatggaacacactaaacaactctccgacgtcctctaccagcgatggtcagaaggtctccgcaaccgctggggcggcatctaatctcaccctgaatcatcctcacgcaacatcaacctcagcacatcctcttactctttcttccattcgctgtatagtcccgatttggcgttctgacgcatgtacaactctttgccattggctgcatccttggtgtccgttcgttcattctgtttaccgtcgcttactctggtgggactggtcccggagtttctaatgatctggtgtaatatttttgcgctttcttgtgtactttctttgccccgatagaatgctgcttgtgcttctgtctttgtttattgggccttggtcttttgtgaatttttttcctaggtattctcctggattactagaacatacatgtctgaaatgtgacaaatgtcttgattttttcatcgcttcgcattccttcgatgtatctgaagctgtaactaagatcaagcaaacgccattcatactttatccagattcatccggtgtcaactcatccataagtttacggtatagcgtatgcagggcatgcgaatggggctctcctggtatctatggcggtcagccggctgacccgggagttgtggagagatactccgtacatgtggctgtcaactggaactgcgcagaagattgaagacgaatccagcggaatctacgatagcgcggatactggctacttgtatattgaagatgatgatccggataatgaactttggctgaagctctctgaccacatggacacttccatctttcttgtatatcaatgctgtcagtacattccctttggttcgtagcatagaatccgccattactcacgctagcaccagggatagaaacgaatgccaactgggcgatccaggaaggggaataaataacacagcacctacaaaacaactcagtcattcgtaaatccccaacttgacctaattccaccaccacattccgaacttgacttttttattaaaaataaacccaagataagatttaagatacttggatttatacttagctcatagaatctccaacttgatatcgcaacagtctataaaaacagtcatttaatcgatgattcagcaacttcatgaacgccaaggcctgtattttatgcatgagacccatatactgaagaataccagacaatttaaccgaaggaacaaatcggcttcactttaaaatctatggagtcattttccatttgagtcaaggtcccgctggtgaccccaaaccagcgggatcactccaacgccaatgggtcgcgataactgacgaccccaacggcaaactctccggccatagctgcttatgctgttatcgcaaagttactattgccaagcagtgactctaaacggatctgaaatggagtcaactataaaaagtacggcgaatcccaggttccccggaagagcagccagtcccttaccctacaccttgtcatataccttatcatacacacctctcccaagatgcgtccttctttaagcacgtggactcttttcctatcctacctaggatgcagtgtagctgctccggtactacctattctccctcatcatcttgttgcgcgcgacacccccttcaacagcagccttccgaacatcaccattttcgctactggaggcactattgccggctctgcttcctcaaacaccgcgaccacgggatacaccgccggtgcactgggcgttgatatccttatccaagccgtgcctgagctctggaacctctcaaatgtcaaaggtgtccaggtcgctaatgttgattcggggtccatcacccccgagattctcctgaacttgtcatcgctgatccaagaggctctggacgacccatattgccagggagccgtcgtcactcatggaacagatactttggaggaatcggccatcttcctggacctgacgatcaagacggagaagcctgtcgtcgtggtgggcgctatgcggcccgcaacagccatcagcgccgatggacccatgaacttgctggaagccgtcactctagcaggcagccccgatgcacggggccgtgggaccatggttgtgctgaacgaccgtatcgggagcgccttctacatgaccaaaacgcattcaaattccctagacaccttcaaggcagttgaacaaggctacctgggcttcttcctggataccaagccgctgttctactatcctccagtcttgcccaatggccgtgtgtacttcaacgtctcgggggccacggcattgccggaagtggacatcctattcgggcaccaagtactcaacccgaagctggctcgctctgcagtagagagtggagcaaagggtttggtcttggctggtatgggggctgggggctggacaaacgcgggaacaagtgagattgagaacttggtcaagaaatacggtacgcaagtcgtggtttccagcaggacgatggggggctttgtccagacagacggcactggaaatatgtacagtggacaggacttgaacccccagaaggctcgtattatgttgcaacttgctctttacgcaggatatggctctaagcagctcgccacattgttcgggtttgcatcttgagagcatgttcagatctcagcaatagcgggaggctacatagcaattcctagtcattagcgcttaggtatatagtatataaggataaattcatgtataacctgacctctcaccgaaattagagccatatattcgtaattactggctcatccttctcacaatggcactgccaagaattgagctgcaatacgggttggttcgtgccctgctcagtaggatttagccgacagcagagaaccccacggcaaaagatcgttccaatatttggtgtacgcccagatctggtaatgattgaccaatgtggattatctccaactgagcttatcgagaacagcacctccaggtctgggcaagactgggcattgtcagcaattgtcttatctgatgatacccagtggggccgtggaataattcgcgttatctactccatatgttgtacatcttttacgtcacaatttcacctaatcatgatccaattcaatgagccaatgatacaccgggtatgatggagtatcgttgaaaaatcgcagttataccagagggcataggagcattagatgtaaggacataccgacgtttttagatgtttgcctgagatatttgcctggtctgtcctttagatgtatatgaaggcgatcataagtataaactgtagctactccgtcaagtccgtctctatgtctagccgggcaattgaaagaggccgaaataagaaggtgggtccttcccgagaccagtctccacttcaaaccttgtaatatcacggacgggttgctcttctgggccacgactgtaccgcagaggaacagggaattgattccgaaggacagatcggtacgggttcttcgttatggtggaaaaggaggccttaccatctgtcttgaactcggatctgaatggtttgtttgtctagtttatgggaaataggagctagacgaatattatagagctcacggataattgcaagctcctagaagatgtacagagcaggatgttgctatgcatgtcaattttatcataattttaaattaaaggtccatgtaaactaagctaagtaggatggtagtaaaattctgcagtcctgttgcttgaagctgatggactgattatcatttgtgtggttcaccgccaaccattagatcaggatggcatctcgattcatgcattaatcattcaaactgttttctcatccttgtcgttatgtttggccacatcgttacattttgcgtttcgctttggatgggagcgcggtcgttgtttcgattcatgtgccgcgctttgagctttggaggctattgctttatccctttcatccagacgagcacgaagttcagtaaacatccgctctaccccatctaactgctccgtttcttgagccttccactcggcggattgaattcgatctggtatcgagcagaagttcgtttccgcccacccacccaaaaatagtagccaaccgcccgacaatttcctaagaggaaataaccagtccggcttgactttatattcaatacctttggcgtataacaatcggacatagtcgactaattcgcgcttcatctgaagcagtgaatcgaggtcaagcttcgcctcatagatacggagccgaagtggcgtccagataatcttcggcgaggcctgcacaatgataccagacttgagatcggcacgtatgatacgtgggtggccgattggggagcgaatctgaaaaataatggatagaacagagtattcacgatataacccagtaaagcagtcgggatggaactagaagaagatcatcaggggttaataaggatcatccatcgatagaacgagccgaaagatgactaacctcgcaaacagtccacctttcttttttgtgcctagacctctagatctcttgacagttcgtccctcggcagaggtctcgaggacctcccaatctttcgtgttacggataagttgagatatggattgatggggtagacgatctgatcgctttcgttttggccgtgatggaatttgctgtggttgggccatgctcagcggctgctcttctgtgggtatcgcttgcatcacggtattgacaatagggcgatagatggatggtggagagcgaaggtggtttgtgtgggattgggatcgggactggattattgcgagacgcggatcgcgtcacgactttgtgtttcgtaggcctcaacgcgcctgatattcgaatgccaatttagtaggcaattcggtgccactttagccgattaacaaccgggcacctgaactgagactcgagctgagtagaaatatggatatatttctaagaaattatgtttaaaagcgattctccatccaatcactccaatccagggctagattgaataacaaaaaaacaagtgcatcatccgtgaatcgaacacgggcctcgtcgatggcaacgacgaattctaccactagaccaatgatgctgaggcaccaggcggatctgaaagctgattggctggttatagtataatgaatagaaatggaatcaagaccctaaaacccagagtatacatatctatcatgacggtcatcgacacattgacctattggattaggaatgatgaattcagccaatattcacggtcattacagaagcaaaaacctcagaatcaattcatggatggattgattatctctggctacctaatttccgaggtattaacctccagggctacttcgtggcttttgaaaagaagaaagaatatatgatagaagggcatatacaatggtataggattcaaattcgatgatcttagcccggcaaaagcgatttctgaatgttgactatggcattctattccttgtctgatcctttcaacttgtaatccaacaggcctttgattgagttgagtttgactgagtgaagctataagctatgtgaatgtacttatacagagctaaacatggcatacaaatagaacgactagacatgggtgttatcgtcgaacacatcgatatcctctttctccgcaggcttcgtcttccgggacatccactcatgacgcaagagccccagagctgttggccggtcttcaggatcccattgtagcgcttttcgcatccactgcacgaagccttccacatcctcgccatcaacattgcgagctatcaggctctccaagcttcggtctggtattggagcttggcccgtccaagtcccttcttcatcccagaacatggagcctagtcgtgtcttgtcgcggaactctggtgcaggagggccaagtagagcaactagctctgcgatgtggacccggtcgtcaaaggctccatctgagtttcgtccgtcaatgagcccctgggaactgatgtagttccatgcctgaataaactatgtaagcgtatttccttttcctcaaaataaagtactcacaacgacagcagtaccccaaatttctgccctgtgatccgatttcgatttcaggacctgttcaggaggcctgcaatgcttctcctcgatacctgacatatcatcgcctgggaaatccagacgcaggggaacaccatcgcccgggagtatcattggggtgagaagctcgtcattgctgggtccagcaacttgtctgttgttggaaacgttaaatgttgcgtttggcattatgcctactctgaggatcagtcagtcatcccagaaacgatggcgagtgaagatacgggcagtaagataacagtctgtgtgcaggaagtccagcatgaccagtaattgttttatagtagacttcgtcgatttgagatccagcttgtctcccgcgtgcatctgtcctgggtctagcgagggtgcctcgtggacaacacaaatatgagggccgcgaggacccttgatggaaaagcggtcgctaacttcgtgaagagggcactcgctttgctggtatgttttcggtggattgagccgcccataaggcttgagcatatggtccaccacatagatctttaaaacaaccattcttggctccctgttgttaagtgagacttagagcagtatcgttcgggctaaatgagacactcacgtcagatcaacagcataccaaaccgctgccgtgggcccatagccgattttgtgtagaattcggtatctgtcgttcaaggtctcttcatcctccacgggatatgtgtatgtctcgttgggctcatatcccgttgcaagctcttcctcaattttgacagacgaatccagtagcccaagatcaaacactggaaagactcttgggttggatgtccactgtgatgagcatcggcgcgaccaggctgtttttcgatcaaagggagagatcagttggtacgtggaaatgggaaatggggaagaaatcccatatctttgaataagccttgtgttagaccaaacacgcataccactcactctccagttcatgacgaagatgcggtggttaacgaatgcgcttggttacggagtaggtacggttgaacgacggaggacgtgtcacccctgcatatttccgaggtctatttatatctcgaccggtgttttctttgatcatataaagagggccatcaccgcaagcatagaaaaaaaaaacaattcttagtatgtcgctacggagaataagcctaaacagcattgtctatcaggccccacaaaatttgaagtagcgacgtgccccataggttgaagtcaggctcgatctggcacatgaagctagcaggtgtacactagtctagacataactcaaacctacacgttatcggctacggagatttaaacccctcatgtattccgtgggactcgtcaaatggcaatgagagccacgactccaggaacgtccacgagaaagcccggtttgatatttgttgctgacctacatggacttccacaacacggtaatgttgatgtccctgtggtaggtgaagcagcatgtgctacaggaccctctgcctgtgctgtctcatgtgggctacggagagatggtggtcagagggatggggagaggaagaagagaagagaattggggggggagaggtacccttttataccccaatcatatgggttcgtgggctttctcaacaaactatgcaaacgagaatattactcgcttgtctcgcttgcctcgcttgcccagtatagaaggaacgtttccttctcatctgggcaagtacgatcaccggtccaccgtcccttcctagttcgtcaccgttgggattctcgcctggcttctctttctttccttctctgtgtttagtcgaacaaggtgccttcctggaatggacaccttcccactttcctgatctgtgagtcacttgcaccttccattgaagtacaacaaagcacattgttctttcccaattaagttatagacacggtcaactttgtataggggactcgtctcgtacgagaagacacaacaagcaaaccccgggtaaacaccgcaatgcttcggtcttccaggttccaaggtcagccttgactgttgatatactcctgaaccatgactacaacagcactccgtagtagatctaggcctcggcatacgccaagactccacgaaacggcttaataacacgctaaattaatgcctttaattcccccctgaaacaccgcctcgtgcgggacccgctgtaggctagactcaggagactcggagctattattttctcccttctcaactcccctgctcttcttgttgttcttgctattgttgttctttttttttggtttattctcttatgactttttgaaatatcttgatctctcctactggctggcccacaatggagagcattccaggagcggagagcctccttgacggtccatttccggataaccagaattcaaatccgccacaaccggactctgcttccgagcagttctcccattccagtctctcacgctcatcgtctgtcgcccagaaaagaatatcatcactaccttgtgccaagacggcccgccatgccaaacgcctcaccttgaacttccctatcaatccgaacgaacctgagacatccgatcttatcagctcacccggctctataaccccagttacacagtcttcgactcgtccctcccccgctcagcccccgggaattcctatggcatttgaggtcccggacgatggctatgacttcctgcgggccatcgcctcgcaggaacggaaggtcatggagctccgcgaggagctcactcgagccgaagcagacctagtgacaattaagaagcaatgggcaatgtcggaaaagtctaggaagcgggccgagatcaaccacgcggagccactcatgcccctgcgggcgcctgatttctcaacatccgaggcttcaagttcacatgcccggcaacagagcatgagctcagttacaagctccacggtgtcacaggaacggatgagccgggatctagatcgccgatctagcgtgcgtgctgctgtcgccgccgcaccaggaaccaagattgggagtaatggtcggcgcgtgtttcacggcacacatacacggacgttgtctcttttgtcgccagtctccggtcccagcatgtcttcccggggagaactaggtctctcagatgaacgcgtgggccgtactccgcgatctgcaacattaccatctgtcgagcgcaacaatccagctttgatgaatgcacaactagacgagagccaagtaccggaacatctactcgcacagtggcacaagacccttcctcccccttcacgcgaggccttggtacgcacaggcaagcaaatggcatccgatctccgcgagggtctgtggacattcttggaagatatccgacaagctacggtgggcgaagaaggaatcagtggcacgcaaacaagaagctcaccatccagctcactggcaccgccacatggtcgcaagcgggattcgttggcatcacggagtagagaacggttgatggcggacggcaagctatcacgatcatcatcgtcatcgtcttcgcgggggaggccagcggccgagacaaaaactggtaaagacaccaagccggcggaaatttccacatctttctggaatgaattcggcattgatacacccgctcagaagtctccgagcgctacgcgcaccccctccgacaacaaagccgccaaccgaaacgaggcgaccgacgaacagcgcgatcaccgctcgagtaattcgattgacgcacaggatgaagatctcgacaactgggaaagctgggacacgcccctatccgggcagaagacgcacacgccctcatcgagccgatccacagttgcatccaaacacgaccagtcacctattacacagggtagcagccctcgaaccagcgctaggtaccgttcgaccttttctgatttcatttatgacaacctcgtcatgcgctgacacgttcctagctttggcgatttgaacccgacttctgcacttaatcctagtgtctccgaaagcattccctggcctgcaattaccaagctggctccttccaagcttcaacgtactgcatccaacctgatggcagaatgggagcgctcgctgtcgccttctccggatcgagcttcttcttcttcttcgctcagccgtaaggacagcaagaaggactaacaaagttcctgctttcctttcattgtatatacttgctacctcttcttcggccctatctacggaatcacgtagggctacgaccttcgaattataccatatgagagcgttgcttcttctgttgtcgatatatttcctttcctttgctgcctttttgaagaactctacaggcatcgactgctttcaagattgttgaaatacgttggtttgattacaaatgccatttttgcttctctagcttcacgaatacaacgagtttttatatgtcttctttttgcgtctttcaacgtcaaataatgttttctgttcctctatctatacgtatgatgcgtaccgataacggcgagattttgcgggccggaacatcacgtgccgaactgcgctttagacttttctagttccccgtaaaataaatttgcggttcagttactcgcctccgcaagatctccgcgttctgtatattacttgctcacgcggtttcttctctcgccgaagttcagtggattgatcattcaggccggcttggatccaatctaacaagtgcgatattcagtccaaacctacccgcgtcagccttcaatatggcgtttccaggcaccaaaggcacggcgatcccgatgacctccctgggaggtaactcgggcaccgagggaatgaatgatcaagaacaggctatgatcaagatggttcgtcctcgatcctgacctgtattccgtctaattctaacaaacttcggtatagatgcaacgtggtatggagtcctgcccgatcaaaacagtcatctcgggtaccatgggtttcggtcttggtggtgctttcggtctcttcatggccagtgtaagttggaaattgaatattcgagcactgtttcatatctaacatttacccgcgatagatgtcctacgactcgaccttcacaccccagggccgcgctatcgccgacctcccctggcgcgaacaagtccgccgcggttttaaggacatgggcgcccgctcctggtcctcggctaagaacttcggtatcgtcggtgcgctctactccggcactgagtgctgcatcgaaggcctccgcgcaaagaacgatcttaccaacagtgttgccgctggttgtgtcaccggtggtattctcggcgcaaaagctggtccccaggctgcggccttcggctgcgctggctttgcggcgttcagtgcggctattgatgcctacatgagaatgcccggtgatgagtaaacgctcgattcggatccgacgcgaaagcacggccttgtttcgtcgcttggcgcttttgttgccagtcggctttacctggttgcgattttccacctgtacattttacagcatctggcgttctggaatagaacggaagcattgcgggcgttttcggttgttcttgtctattttgttgggaggatggttctccggcctgtctcctttgcgttgcatgtcttgtttgagcctgctttgcatggccttggcatggtggttcacttatattagatccttgcgggtctgactctttactcttttgtacaatactaagcgtggacatacatacaccactggccttttgagactcacctctcacaattgataccaaattatttatgctcatattattcattaattatgaagagcctccatgaaattcctcggcttattcaaatatccgatttgggctaaatctacgccgtccctttcctggcagaccgcatactatgcccgtgccaaatgcaaagctaaggagatccattcaatcactataccacgtcccaatttactactttaaagttacaagacctgacaaaaatacagtttcttcaatttatacacactcctaaggcaacacaatatacttctccaggtgcttaggaatggaaccacgcaggttcttgctctcgagccaggtgctagaaaacaagcgatccgcataccggtaagcaccgtcacagagaatggtcacaacggtgttacccttgcccaacttctccgcgatctccttggcggccaccacgttcatcgctgaactggcaccaaggtacagaccctcctcatccagacagcggtaaaccatctcgatggtcttctcgtcgctgatgctcacggatccatccagcaagccaatatcgggctgcaggttatctgttacacggccttggccgataccctcagtgatactgctaccagaccggtcgatcagggtaccaccgctttgaatgtagctgtggagcacactgcccggaggatcggcgaggaagctcttgacgcgtccgtcactgatggtcttcaaatagcgcgtggtaccagccaaggtacctccggttccagtggcacaggtaaaggcgtcgatcttgccctcggtctgtgcccagatctcgggcccggtagtgtcgatgtgtgcttggcggttggcaatattgtcgaactggttggtccagactgcgttgtccaatgactcggcgtgccgacgcgcctggtggttgtagttttgggggttgtcgaaggctactgcggggactgggtatacctccgctcccagcaggcggagcaagtcaatcttgccttgcgactgggtgttgggcatgtagatcacgagcttgtagcccttggaccggcacacatgcgccagtccaatgccagtatttccggccgttccctcgaccacggtgccacctggttgcagaagtcccttctcctcggcatctttgaccacgaaaagcgctgctcggtccttcacgctacctccggggttttggaattcggcctttccaagaacattgcagccggtctgctcggaaagcttcttcaatcggataagcggggtgtttccaatcgctgtagtataagtcagctaaaagtatatgcaagtgtgcgctcggagctagacataccctcggtcaatccattgacaacgccctgggcggttgatacgcgggtgcagtaggcagtggatccctcaccagcagcacgagccgccgtggtggcaaaccgccggacactttgacgaaacatcctgaattaatgcaatgcaggaataaatggtcccatcgaccctcggggaatgacgagctcccgcacctccgatggtcggcattagtcagctcacgtgcgtctgctacccttatcgggctatcggcctcccgttttgggctgtttgtttaccgccaaggcctccactcctttgatcggtcccgcagtgcggtgcttttcgctttcgaataatcaacgtcaacaacaacaccataatgcctggcagagtcgccgcccgttcgacatctgcgacaacacgcagatcgtcagcacagccctctgcgtctgggcgtgctggctccgttacgccatcgtttgcgatccccgaagaaccaacagagccaacatcatcccccactttgcgtcgcgatgtgtgcttgatctttgcggatgctcagcgctcaactactggacatcgaaagcttgttgtgcgcctgcgcaagcttcaggagttttgctgtggtatctcacaaaagaaaaataagggaaaggacgaagagcccgaggaggcattgattgctggtgaggaaacggaggctgagaaagaattcaatgtggaagttggccgctgtatgcttcggattctcacgattaagaaaagtgagcctgttggagaccgaattgtacgctttttgggtactttcctcggccatgccgcggagaaagataatgagatctttgctgcgggtgaagacgaggagcacaatcccgacacaccgacttcccgcctcacatctagtcttattgcgctgatgaaacctgttatgggcgccaaggataagatggtgcgcttccgcgcaacccaaattaccgcccacattgtgaactctctagaatcgatcgacgacgagctataccatgctataagacagggccttctgagacgcctccgtgataaagaggcctctgtcagggtacaggcggtcctaggcttaggacgtttagcgggtgatgatggagagggcgacgacgacaactctgctctgcttgaaaagctgatcgaaattatgcaaaatgatacaagcgccgacgttcgcaaaaccctcctcacaaatctccctctcgctccagtgacgcttccttatcttcttgagcgcgcccgtgatctggatgcccctaccagacgcgcgttgtactcacgtcttctgcctaccttgggtgacttccgccatttgtccctctcaatgagagaaaagctcctccggtggggtctacgtgatcgtgatgaaagtgtgcgcaaggctacggccaaattgttttacgacagatgggtcgaggattgcgctggtacgaacaatgacccgaatcagggaccgactggccagcgctctgcacccgatatcaacgcgcttcttgaacttttggagagaattgacgttgttaactctggaatggaaagcggcattgcacatgaggcaatgcgcgggttctgggagggccgtgcggactatcgcgaagctgttatctttgacgagcctttctgggagaatctaaccggtgaatctgccttcttgctccggtccttcaatgacttctgtcgcgtggagaacgaaggcaagtacgagagcctagcagaagacaagatgccagaggtcaccgcgatggcctatttcctaggcaaatacatcactaatctcttggagcggaagaagatctccaaagagtctggtgaagcaaacgatgatgacgcagtcgagcacgaatttgttgtggaacaattgcttcatatcgccatcactctagattacagcgacgaggtcggtcgacgaaagatgttttcgctcctgcgagaaactttggccgtgccagaacttccggaagagagcacgaaacttgtcgttgaaacacttcgctgtgtctgcggacctgatgctgcggctgaggccgaattttgcagtgttgttttggaagctattgctgaagttcacgacaccatcaccactgaagatagctttgtttctgctaggtctgaaatcagtgatgacgctagcagacgatccgaaactccgggggttgaagagattgctccctttaataaggaagaagccaaggccaagatcgtccgcgagattgttgttaatatgaagtgtctatatattgcccagtgcatgttgcagaatgtccaaggccacctgcagcagaacatgaacctggttactatgctcaataaccttgtggtgcccgctgtccgcagccacgaagccccaatcagagagcgtggtctcttgtgtttgggcctttgttgtctgcttgacaaggttggtaacttcccttttgatggaaggcgaaattcgctaatattgacttccacagaatttggccgaagaaaacatgaccctcttcattcactgctatagcaagggtcatgaggcattgcaggtcacggctttacaaatcctctgtgatatgatcacgactcacccatctctcctcgctcccgttacacaggctgacggcgagaccgtcacgccgccccccatgcagaagcctttgctcaaggttttcgcccgagctctgcgtgccaactctcccagcagcgttcagtctggagcagccgccgctctctgcaaactgctactgaccaacactttcactccctctggaccgaatatcccacccgcaatccaggaacacaatcagaatgctgttgaatcccttttgctatccctcgtggtctcattctaccacccacgcactcgtgaaaacccagctctaagacagtcattggcttatttcttccctgtatactgtcattctcgtgtggaaaacacgcaacacatgcgccgggtggccgtaccagtgattcgtgccgtgatgaatgccgcggaggagcactactcacttgaggccgaggaagacagtgatggggaaatcgatccgagcgtcggggagcgtgaggtcaaggctctcatggctggtgtcgttggtatgctttccgagtggactgacgagcgccgggtcgttggccttggcggtgaacgagttctggctggcggtgctgcaagctccagtgtttgtggatgggttcaccttgccctagttaaggagattcttgagcgtgttctcggtgtgagcgctgccgcgaatcgctgctcacgcgaggaacggaagctcctattctccctcctcagcaagctttactttgtcgctccaacggtgcccgcacgagctagctctcgcgttcccgagggcgatgatcaattccgaactagcgttcgcagtgcgacaggggtcgaaatcgatcctgaaaacattgccctcgcgaccgaggtcaaggagctattagaccaaaccattgaagatggtctcgccgccgaagcctccagccgaaatgctttagtcaaggccaagaacgccatcctcaaaatccttgccgttgcacaagatggtcgcgctgctagtgctcgtcctcgcgaaggcactgaagatcccgagaatgatggagctagtgtacgctctagtagtgttcgtcgctctgtggaccctactggtggctacagccgtcgtcatttctctgttgagccaagcatcatggaggaagacgaggagggtgatagccgtcttacttctgctacggccaatcggcccattgtttccattgaacctagtattatggaagaagatgaagatgaccatgatactagtcgagggacaataatcaaggaagagacgggtgatgagtgatgactgttctgagatttttggttggcgtttgaagttagggatttggggttaagtttctgtacatactttcagtttctgtttttcttcgaatacctttgcatacgattatatgagctatctgagttcctcatgctttgtgcatgttgatgtatatatccacgtgatgtgccacgtgattatgttttgacagcggctgagagacttgacatttggaatgtccatcttgtccaccttgtccttccaaggttgtctatatttgtctcggttctcgctatgtttcactgtatatctatctatacctaggtacggcgtacatctgtcctacctggtaatcgcttttgacctttgtgcattccttatattcgatacatatcctacctaatagttcaggaagtgtccaatcacccaccgtattagccattccctagctcgagacattaatagacatgcatctatatactagtcctacttgactcgtctaaatctgacaaggcgtactaagacagggatctgggcccggttgggttgcacggtcaaaaccagtccgaacacacaatttccaggggaatttgaaggatagcagattcgatgaaagtgagagagagaataaagaagattaatttctgaattcctcaagaaaaacatctatataattcgttttgtaattgtataatctccgtctccccccgtgagccccgaaacttttcattttctcctcaaaactccaccgagttggctcttttcttcttctcccccccccctttcccttctctcctcccccgggctttctcttctattcttaccaccctcttctccggccttgtctttgtcttctgcttttcccgcagagacatcttccccatcttccccccgggattcccttgccgctccgttggcaccggacaagtcagcgatggcggccgtttcagcaccaacccccaagctggatcgatacatcgtcatccacgttgcaaccacctgcgacgaacatggcgtatatgtgaccaaggactcggctgaggtcattgagttaggctggatcttgttggacaccaagacctgcgaggaagtccgttccccccagtgtcttctacccaacatacaacttactcccgagaccatggaagctgacatattttttccccaattgtttagttgcaccgcgaaagtgttctcgtcaaacccgtcaatactccaatcaccccgctttgcagtaagatcgccttgaaaacaaccttggattgcattgggttttgctaggaatccaatttgtggctgacaattctctgaagcgagcttgaccactttgacatgggaacacgttcgctctgcaggcactttccgggacgccatctctcgattcgacgccttcgcccaagaacacctcattagcaaacacctcgagtttgcttttgtgactttggactcgtgggatctgcgggtgcagctgccccgcgaggcccgcgacaaggccgtcgtgcttcccgcatacctgcagcactcccgtactttcgacttgcgaacagaatatcagcgctggcagacgcaccaccccgagtcgcttcctttcggtcccagctcgctctccaacatctgcgctgccctcgaggtcgagcccgttcagtcgtccgccccgattaagcacaaccttcctttccatttgcaagctttggcccccgcttcgccccgccgtgccatggaggaatctgttactctcgcccgtgtgcttcgtggtttgattcgcaagtcgcagccgccccaggaacaccctgagatcctcactcgtcctatggatgctcatgccgacgttcgggcctttttggcggaacggagcaaggtcctgcaccttagtggtctgccccacgataccactcagtctgagttggagagctggttcactcagttcggcggtcgtcccatcgcattctggactctgcggacgccagaccagcacaagcccactggaactggctttgccgtcttctcttcacacgaggaggtgagtttgcatcttggtattcatttggctgttctacgctacagaacttcctgtgttttatccttagtcttgcctactaactgtttactaggctgccgaaagcctgtgcatgaacggccgtgcgctcaatgaaaaggcgattgaggtctctccctcttccagtcgggttctagaccgggccgccgagattctcactcctttcccgccctccaagaaccgtccccgtcctggtgactggacttgcccgtcttgcggcttctctaacttccagcgccgcacagcatgcttccgctgctcgttccccgccatggcggctgcacccgacccaatgaactacggaaactacggctacggtccgccatcaatgatgcctcctcacatgggccacggcggtcacggtatgggtggtggtcactcgcgtggtatgggtggcaacggcggcgttgtccccttccgcgcaggcgactggaagtgtggttctgagggctgtggctatcacaactttgcgaagaacatcaactgtctacgctgcggtgcccctcgctcgggcgctgccgtcgtggcagactcggcattcccgtccccgatggatccaccgtcgcaatttaatatggggcccaactcgatgactagcacccctgcaccagctccgttcgcctcgaccgccggtggattcggtggattcggtcagcagtttggtggcccgcctaacaactacgctctgccctcgggtggcctgggtaacaacacccccggtgcgtaccctcccatgggtcagatgaactcgggctacggctcttccggcacctcgcactccgccgcctcgttcgccaacccggccactcaggctgctttcactggtgcggaccacggtgttccatccaccagtgcttcgaacggtgccttctacggtaccgatggtgctagcgaccctttcgccttcttgtccagtggcctcggtggtctgacagtgtctgacgacccccactctcgtcgcaacggctccggtgccaacaagtcgcccgcttaaatatgggtctagttgtacctatttcatgccccactcacgaactgggcgctcacgcttatgttgtccatattgcaaccctgcattgtggcgggtttctgcgttggttgatattggttgatacgcatttgtataagggattctgcggttttggtgcatcgggttggaaggagcaggcgggttagcgttgtcgaagattttcggatttctttctctctcgccttcgccgcccagtgctttttttgcgtgatgccttgtttatcgttgggtttggtctgttttttgttttttttgtttttgttttcctttttcttcttcttttcccccatatttgtgattttcatcttgcgctatatggttgttttttttatcgagggcccttataggggtgtgtggtgcattgtatttttcgaatgttccggcccatctctggtttattgtctgcaggcatggacacatttgcgttgggtttgccctgcttttggcattgcattttagatattttgtggctccctttctgcactctttggtcatgggaagcgtcggagaattcacggtcttgatctgggtggggatatactgggactccgtttggggtgttggggatttattttgaagcttgggcatcgaatggaggatctcttcggggtcgaagcactgtgaatgcaaaaaaatcattgtgtctatattttcatgtgtattttcatgtgtattctgtttatttgggtctttcgttaggattatataaaattctagcagatcgggtgatatatattgaccagtacagagtacggagtacattataacgtcttagaagtgtactattcgacagattttagtgattcaaggtgaatctgagaccttttctttcatgacaacactgtttaatataaagatgcattctcattacaagattgttggtcaactgctaggtacatggagttactatggtgcgtccatactgaacgaaagtaccgcgagtattagcgctggaggcagccgtaggctttcgcgtccaccgcccggaacccgtcattgctccaacccaattgacctcagctacttgacactccgcgttgcccttattctacctcattgcttcctttgaacttgttgtttacagacctttaatcacctctaatccagtcctccttgattcacaatgtccggatacgaccgagctctttcaggtaagctagctccccacgtccagctccctttgctcctgttcaggacgagagctgtatcatgctaactcatcgcagtattcaggtatgaagccttcaagctacacttcagctccagagtttgttttctaaccctctcccagtcctgatggacacgtcttccaggttgaatatgccatggaggctgtgaagcgaggtaagatcgccgtgatttgcttccctagcagcttcctctgccccattttctgctgtcgctcccattctttccatcaatagacataatttgctgatggtagatgattctaggaacttgcgctgtgggtgtcaaaggcaaggacattgtcgttctcggttgcgaaaagcgttccgccctcaagctccaagatacccgcattactccctccaaaatcgccctggtggataaccacgcctgtctcgcctttgctggactgaacgccgatgcccgaatccttatcgacaaggcccgcttagaagctcagtcccaccgtctgactgtcgaggaccccgccagcatcgagtatattacgaaatatattgctggtgttcagcagagatacacacagagtggtggtgtgcgtccatttggtatcagtacgctggtggttggatttgacaagaacgacaccatcccgcggctgtaccagactgagccgtctggaatctactcagcctggtaggtggtttgccagcctacgtctcgtaatggatgaacgctaatctcttttctcattacaggaaagccaacgccatcggtcgttccagcaagaccgtccgcgaattcctcgagcgcaaccaccaggatgacatggaccgtgagcagacaatccagctgaccatcaagtctctgcttgaggttgtgcagacgggtgccaagaacatcgaggtcgccatcatggcgcccggtaagactattgagatgctgccagatgaccagatcgagtcgtacgtgaagaacatcgagactgagaagcaggaggaagcagccaagaagaagacccggacagggaccaccacggcggctattctcacccggccgggtggcgccgagtcgaccgattaagtgcgaaaggattcagagcctgagaggtgactggatcgttgatttgtttcaatttacagtagcgttgggtcctttccttgacgagaatccaaaatcatgaagtctaaaacacatctccacatgtgcaggtttatttcgtattgtatattgtacaccaaggcagaaaagggtattggtgccaaggaagttttcatctgtcttgaactatcaagaaacagtaccatcaaatcgtcaacatcatgaaattgcgccgtccccgctaattgtcttcccacctccccacccccaatatacacagtttagcccatacggtcggacacatctttgatagtgaagagagagcgctccttgtcgcgcgcaacacgttcgtccttgagcatacttgatctggtcagcatcctgccaattagaagattgtgctcgacataccggttgtccatacgagcgtcctcaccctcaacatgtagtcgcgcctcgggctcgcgtgcctcaatgacaaagtgattatcacagtaagggcagtattcgtcactaaaagcaaattagcctgctgccacttggactttgaaccctttcttgcatacgtctcgtcgaactcagcagcgtttttgcggaaacacttcttgcacttcttgcatgcaaagatctaccccatcaatgtcagcctgatagacctgcgctagccggagaataggggcgtaccatctcgtcgctcttctcgagcgggtgtgactcgctctctcggtggcattcggcgcagtcgaaccattttcggcctagatatcctcagtgaatcctgtgtcatgaaatacgaggtcgatttaagcgtacagcagtgcgagcggatggatacttgagcgttcagaatgtgtttactgcggagcggggtgtattagcaatcggattttggaccagggaaaggaatcacgagcatgagcatgctccaggatatcacgagaagcagacttaccacatggctatgaaatgcgaaagaaaaatgacagcaaagtgctagatgtcgatgctcaagtccaaagagacgcggacagaaagtgatcgccaactcccgtgattccctccactttcctccccgccacccatctcatcaagttttgcctttcacccccttttaaacccctggatatccctcggaattcctggaaatattgacggtcaagcttcatcttctgttcctgggccttttgcgccgcttacgtcgtctccttgctccataccccgagccccacgacatccctgtagcctcagttccgtgcccacgaacatttactctactgcctccgcgccactatttgacacccaacatctacaagtctatgatccattctttcagctggtctcggcgacggatccgtgataatggctatggccggcacagggaaacagccggacaacaatgatgacgctgctcctcccactgtatgcatacgtaactgttttgttgcacacaataaactaacatgaaatacagccacagagaccggtgtcctccttgctgtctcatttcgagaatctttctcaccgcagagctccgtctgctgtagctgccagcccgcgcacctccacaaaccttttactggcaactccggagtctggcgatgacccccgatcctccacccgtgcttcgctcgatttgccccgagaccattccccatggacccctgctgaagataaacccaccccgcttcagcagtcgaatggcgagagactccgggatcgtgggttctccggcagacgatatggccggcccatgtctatgaacttccaccgttcatcgccacagctaccgccgaccttgacagtacattcgcctaaatcgccgccacgcgtacaagatcgcgatgaagtctggacaccgcatggtgacagccgaaagactcggagtccaggccatcgcccgcgagaatcgatgtccgtctcgccggcaccacctcgcccgatctccccgataccgaagttcggtccgtccgttaatgcaggggatacaatgcctagggtgtcgcctgggtctctccgcgccaacctcactgggagcccggcagaccggaaattaaaaagtgcctcgttaccgcccccagccaaccgcgcatcaaagcccaaaatcccggcgaaaccagccatgctttcttacccagagaccagctcgttggctcctcgaccaggacgagcatcacccgatcgaagtgtttcaccttttagcacccctcctggtagcccagagaagcatgtggctgagccgaaatcgtctgggaagagcagtgctaggccagcaccaacattagctcgaccaaggacggagccaccaattcgacgctctttcgatgagcgattacctgctgcgtctccgagcgccagacatgacgctagagagttgggattctcaaggattcctcctggtccagagccctcacgtaactccaagcccttgatggtgcaagttccatctgccccagtagacgctccaactgccactgctacccctctttccgcgcaaagagcccgagccagtgatattccctccgatcgcccagggcttcctcctcgaccttctggggctccccgccgaagtggagtctctcccgtgcgagagtcttctagacatcaaagcactcattcgcagctggcaccggctgttggttctgtgccttctttcccacgtgctagccaatcctccgagccaaaaccaatccagcggcaaccatctataccccgtgagactaaactgtcctcttctcttcccgagcggcgcgtggtgcgtacagacacagaggaagaagagcaaatcgaagagccagctatcttacggaccgactaccccgatgcctcaaaagctaatcgtcgacctccccgctttaaatctggaccgagagatatcctgacaaagtatgatacccgtttgctggctgtgtgcggcaagtacgtgtgcacgactgggtatctgactagggtgtgggatcttacaactggtgatctagtgatgagtctcagccatggcgagactgtgaaaagtttatctcttgcttttaagccaggaaaagatcttgaaagcgagggtgagcgtatctggctcggtaccagtgctggagatattcacgaagtcgatatcccgagccaatccatcgtggccacccgcgcatacccctcccgccgagaagtcatccaaatcttgcgacacaagaaagaaatgtggacgcttgatgacgaaggccgactgcttgtttgggcaccagacgagaccggcacgcctaacttgcaatacagctaccacaccccttccgagcgtgtagcccgaggtcacacgttctccatggtagttgatgacaagctgtggttggcagcagggaaagacgtccatatataccgccctaatgcacgggatgatgtcccattcaaggtcttcaaacgacctctcggtcttcaacactcgggcgatgtgacttccggttcctataccacgcgagatggaggtcgggtatatctgggacacgcagacggcaaggttactgtgtattcctcaaccgattttgtttgtttggcagtggccaacgtcagtgtgtataaaatcaactgccttggatttgtcggagactatctttgggctgcgtataaaactggcatgatttacgtttatgatgtgtccaccaacccttggaccgtgaagaaagactggcgtgcccacgaaagtcccgtatccagcttcgtgttagacatgagcagcgtatggaccatgaaccgcctgcaggtgacctctctcggcactgataattgcattcgcatctgggacggaatgcttgaggacgattggttgggtaagtaaaatattgctctcatccgttgatggcttccactaacacatagtagatgcgcggatggatgccagagacgtggaatactgcaacttccgagaaatcaaggctgttgtcttaacttggaatgcgggagcttctacccctggcagtgtgcgaacgtcggatttcattcgagatgttgttacccccgaagacccgcctgatatcgtggtatttggattccaggagttggttgatcttgaaaataagaagatcacagctagtaagtgtaacaatgtttgtttgacaggaaggcccgctgacaccgcctcagagagcttgctgcttggtagtaaaaagaaagagaacggcgagaaggagcatatgagtcgtcagtatcgagtatggatcgatcatcttactcgtacccttcacgaatgcatgcctctcgaggaatcctacgttctcttgcatactgcaaacatggtgggactgtttacttgcattttcattaaacacaaggaacgccataacatcagaaacatccatgcctccgagattaagcgcggaatgggcggtttacatggaaacaaggtttgtgatattccggtctttgctatggcctttatctaattgcattagggtgcccttgtctttcgcttcatcctggatgacacctcgatgtgctttgtgaactgccatttggcggccggtcaaacccagaccgctaaccgaaacaacgatattgctgcgatcctagaagccgagtctttgcctgcggaaaatagcatgaccctgcgggcagaccagttcgctagcggtggtgatggcaccatgatcatggatcatgaagtgtgtatcctgaacggagatctgaactaccgaatcgactcaattcctcgaaatgtgatcattgacgcagttcgccagaacaacttaccaaaacttctggatcgagatcagctacttgcttctcggcggaagaaccccggtttccgcctgcgcgccttcaccgagtcacgtattaccttcgccccgacctacaagtacgacgtgggtacagacgagtatgactctagtgacaaaaaacgctctcctgcctggtgcgaccgcatcctttaccgtggcctgggccacgtcaagcagcttgattatcggcgccacgaggtccgcgcctccgaccaccggccggtcagtgcaacgtttaaaatccgcgccaagaccgttctaagtaaagaacggaacgcgtcgtgggaaatctgcattgatgaattccaagatgagaaacgccgcttggcttctgaagttagcatcgagtatctcatcactgtccttggcaccgatccccgccaggcccgtgaattgatcctgggaaagcattagccgctcgcatgattgtctctccttatctttctttttcgaagtgaagagcacttctttttaataagcatttgggtggaagcatggtgtatattgtacgactaatgattttacgatagatatgtatcatgacggttgttagagctaaaaaggtttctttatatgagtgtagtattgtaccaggacatactccgtactctttctagcattgatctgcattcaagaagccactctagagacctgatgtgacatacaataatcggagtattttccgaatgcgcatttcctgttattttgattcttttcctgtcgatctttctgcctttccccgtcccctgtcctccgccccctgtactcttcccagttaggaacattgcaagatactaaatgaaatctcaggagaatgtctcaagatgcgttttaccacaggactactccgtatgcagctcgtataacaatgccctttgcaaatcttatagtttagggcttagctatctgaactcttcaatctcatcttgacgtcttcgtagtcctctctccatacccctctatttaccaattgatgcgtgtaagcgatactactgtgatgatcgacactgttatccccggcgaaattaattaaagtgacatgactttgacccttccccgcacaagaccgggttctataaagatccccggatttacaagatctagttaattagcacagcggaacgaaatacaatatacagtcatgctagcgccattcactctcgctgttgcattgcatttgctaccagtagcaaatgccctggttagggaaagtggtgttgtatgttttcttctgtcatgaactaatcacagagatactgactcaaataagggtagattgcctgctctaggatggaattcctggaatgcattcggatgtgatatcaattccaccaaggttctaaccgctgccaatgaggttgttaatcttggactgaaggatctgggttatgagtatatcaacagtatgaaccgagctttgcataaaatgggttgaatcactgaccctttctagtcgatgactgctggagtattcagaacacccgcgataatagcacaaatcgcatcattccagatccatccaagttccccgatggtatctccggtgttgcagagcaagtccatgatttgggactgaaaatcgggatttacagcagttagtatcccctccgtctgtatactgatcagaaatcaagactgatatacgccaggtgctggtgatgagacttgtgctcattatcccgctagtctgggatacgagacagtcgatgcgcagtcttttgctgactggggtattgattgtaagtttttttgtattcccgtgaatctgctttcacctaaatgctaaaactcgtagacctcaaatatgacaactgcggtgtccccagtaattggacggattcataccattactgtgttcctgagggctctggtagccaccctaatggcacctgtcctgatcttagcgatcccgccccagaaggatatgactggaaatcatcgaacacatatgcccggtatactgcaatgcgtaatgctttactcagccttgaccgaacaatcttatattctctttgtgactggggccaggctgacgtcaatacctggggtaatgaaaccggaaattcatggcgcatgtctgacgatatcaacggtaagttgtttgactgatacgcagtggtagatttagaagctgactctgtgttcagcaaattgggcccgtattgcagaaattgccaatgagaatagcttcctgatgaaatatgtcgatttctggggtcatcctgacccggacatgttggaggttggtaatggagctcttactctcgaggaaaatagggcacactttgccctttgggccatcatgaagtcccctttaatcattggcacggcggtatgtggtatctttggatgtcttatgcttatggcaagatatactgacaaccccaaagcttgattctatcagcgatgaccacgtggccattctgaagaacaagtatcttattgacttcaaccaagaccctgttattggcagtcctgcccatccttataagtggggttacaatcccgactggactttcgacgccgtccatccagcagagtattggtctggtacatcctccactttacagggcactttggtgctaatgctgaattccgagaatgtgacttctactcgcactgcgacatggagcgaggttccccagctcaagagccatgatgcatatcatgtcattgatgcttggactagcaaggatctgggctgcgtgaagactgagtatagcacctccttggagagtcatgatgtggctgtgctggtggtcaagagacgatgctagacagagatcatcaaagaacaatggctttgttctgagtggtcagtatttagtatcgcagttattgcggtagacaagcacgaattttgagactcattacccgtgacatatctccaagcatgtaatgcttaggttagagagcataaagagcataaagagcatttttcatggttgttcaggtgaggctcaaagagcttaaggggatattggccacagtgaacatagaaacacaatggccatatttaggaaatctataacaaggatatgaatattatccagtcaatcagaactcattacaggatccgaggctggtcgaagaacaaagaatattggcgtttgatattccgccgagtatttatagtctctttatcggctttcatgattatattggcattgttcaaatagaatcaatatattgtgaaaaagaaaagcccccttgagtatttaagtgcttcgatgtcccggcacaatcctcatttctcatcacacttcacatctacaatcacattctcagtatttactaccaaactcattagactaactaacacattgtattcaggactatcttgcagcaaccatgcctgcccactaccactgcaactctcataccggcctgccccgggtttggctaggttggggtgagctgggtaaccgcaaggctcaactccaagctgaacagaacgagtaagtgacaaaagacacacataaaaaggatatatactaacattttattagatatttcgaagcctatgcccctgacttcaagctgctacacccagaccacccccgactcggctggaatgtgcacttgaatatcattcgcaagtcgacccgttggattgactggcgaatccacaagactggagataagcagaagcttgttcttcctgatttggtacgtcctgagcaggtcgacagccttcttaatttcttttatactggtgactattcggttgacgaagccgacttgaaatattattcagttaggccctgccctggtggctgcgtgacttgccctcagatctgtcagcttttgcgcattcatttgtcaatgtttcagactgctcttcttcttagaattactgacctccaggctattgcctttcgcagattccgtgatcttatggatactgctcctgctttcgttttgcagtatgctgttcactcagtgtatagtagggagcctatccctgacgggagtaataactttcagattactggcttaaagtctgtcaaagactatcgccctgagttggtacttcctgcagtccttaggtactgcgggtattatcgactgaatccccagcagcttacaagacacgggaagagagtgagagtttttggtgagtcggagttcgctgagctccgccgaaaaagccctaagtttgatggagacctggctcggggcttatggctcgacactattgatatcacagtcccgaagattcagttcccgggtaactcagagcccatcaggtctctgcatccctatatgcacactctgctcccgccacaggcggtagaccccaaacggtcaaactatcagtatgttacttacttgcagccattgcccttcaaggattttaatgaccagcgaccttctaacacacctacatggaccccgtcacccgaaaatagttccacttggtcttttgctaccgcaagcacctcctttcaaagcacgcagacacgtccttcgttcaatcagagcattcaggcttcagtacaacagacccctgatcctcaattgactctagagcagacagaggacctgagtttcattgacgaagctctaatcgatactactatggaacaactcaccgcgcaactaccacaggaatatgccacgagtccagccgatttgaataatattgactggacacacacgatggactggagtgcagcggatgtatcagatattgatttcagcacgcttttggatgatgatgctgtggatgagccggatgtgaatgcattggacttgacacaggtaatggactggaccgaagaggacctggctaatgtggacttcacacattttttgaatgatgacactttggatctacagtctttcgacccatcctgcctggaccagcctatggatatggatttagacctatcagacccgagtttctttgatctcccaaacccgaaatccttcgatatgacagcactacctgatatcgacttttccgggctgactccacatgattccatcgacactactttctggactcaatcccagtatatggactcaatcttccctgtgggaatggataagtatgtcactttgcctcaacagattactttgctgccagatccattgaactcagggataaacccggacttgaccgcttcgaacctgaaggccggacagtcgatccagtccgcgttcttttctgtgagagccaacccgcgtacatcggtctcacatcagagtcaagactctactcaatctcggtacaatttgaggaaccgcccgagcatggttgatttagctgaggagctatagatttaaatgatgaactaaggtgagtcattcccaactttgctattgagcagtattaattcttcttcttttgtctgtacttctacgcatatagacctgtcttttcacgtgttctttgaagattgagattatctataagaatcaataagatatataaatcagcatcatcatctagtatatccatagtaataataatatagaaaagaaagagtatcagccggataataagcgacgaagtatgtgacttgattctcattgggcacctcacttttgaagcatatactccgtagataggcataggaatagtcgactgcttattcatctcttttggtctgtctttttggttttcaaacctattcagaccttgctctccagataattgcatcttgctcacttcgaaatgtcaatgagccatcatatgcaagcatgcacgtgctacggcacgctaatacagactaggctaggctgccttacttaatcgacactcccacccgtggatccactttcacgtgccccttgatcaaaaagcggcacgaggtgagcactaaaatggatggaagtgccaggcactaagcgatcataatacatgcaactgcatatttaccatgtgtcactgctgtgttgccattagttacaccaaccatgctaattgtatatctaattaagctgaatgtacggatcttgattatgttgatgccaaggggaacccctggagccctggagtatacttgggatgactaatatcggtacctggggtacctgaagggcttaaaccggaaggtgccattttcggcgatttaccatcaaccttggaattagccctagaggtcatctaggaggtagtagtttatccaatcgagctggcattgcttgcgcagaggaaaatcaattagcatggtgtagtatagtgtcgtactcattgtactcatatacatggacttggtggtatgtatacatcgagtcctgaaaccaggatgtccgcttgcagcctgagtctccccagccctaggttgcagatcttttaataactgtggatacagaaaagaaccaactttgaaccattgctgttctatagatcgtgcacttttgtatgtagtaactgttgtatgttgatatctcatgtaaccatggaaatccacccagtccactacgtcagagcgtctgccctgttatctttctttttccatttgacctgaacattgcctacttcctatcgtctcctgtcttttgtccattcccttctgtatttccttgcccctctatataaatacaatgcaatgaggcggctctattccccgcttcgggattgcgtttccccccgcgatgccagtgtctcaccacggtcgcgggtcttcatctacctcggtatagcagtgacattactgcttctatcatatcagctgattctcgaccgatcaccgaatagaggcataagctggacagccattcaggatatcgtggctggcgatgacgaacgcttcgttctggatgatatacccgctgataaagagttggttctcgccgctatgcaggctagcaatatgtcctgggttgaggagcatctgtcacactggaaggtgaatatctatcgtgcagatgcgaaacacgaagacggtggcttgaccgtcccggtaaataagggcaatgaagctatggtatatctgacgtacgtttttcatacttcgagtcttgttgtcatactaattgccctcggaatcagctatattatcgatcgttactggtcccttcctgaagtatcagtcttcctccacggcggccgctaccaatggcatgtcgataacccgctctacgactccgtcatctccatctcccacctcaacctcgccttcgtccaagaggctggctatgtgaatttgcgctgcgcctggaccgtcggctgtcccaccgaactagagcccgctcgctatctccgagagagaccagaagaccacggacatcccaccgcggtcgagtatcccgatcggtttatggagttgtttccgcgcgcagaagtcccagagattgttgggacaccgtgttgtagtcagtttgctttgtccaagaagaagattcacgagcagagtctggagcactatgttcgtttgcagcggtggttgatggagacgaatttggacgccggcatcagtgggcgtattctggagtattcatggcatagtgggttctccattcgctgatctcttgatctcttgctaatattgactgtttacagtgatctttggaaaaccggctcagtattgtctcgaccaacgcaaatgttattgccagacatacggttattgtaatatgaccgacagcgaaatccagaagcagtgggtatggcgcggtttacagctgccaaaaggatggccaggacagaaccaaaccgcggaatagccacgcatgtatatcgcccgattatgcttgaatgaactgaacatttccattagagacctgacctatgtacccaatcatcatttcatgaagcgcgttcctcgtccgctagacgacctcggaccaaatgtctcaagatactgaccctcctattcagtggaatccatatataataatctcaccgccatatatcctgcttactcgaccgcttgtggtatccctgactactcatgggtcgttcttcctcagccggaacagccaggaacccaccgaacccgttcccgacgagcacgctcttgcgagcatcgccgccccaagaccggtttagctgggcctcgtggaaacttacggggcgcgtccttgagtcgcgacgcccgaacgccgggctagggtcgtaaggtgtgaaattccactcaaactcatccaggcccttgctgtacacattcaggggctgcgaaagaccgccccgcatctgcggcccgccttcacccccgccgaagagtcgtggtggcggcatgagcaacagagtatcggggaaggaggaatcacggacatataaatctcgaagagctggtaaggttcgcgacaccaacgacgaaataagataggtatagtatgaggataccactggtggcattccgtgattatccgtttcggatgtgagttcatagtgcaggagatgcagtgacttcgatgccatgggaggaatctgctccattgggaatgagcgagagacctcctggatgatagaaaggctgtggagtcgcggagcggcagaaagaatgtaatgtagtcgggacggagcaacgccagtagaagataatatcaaagaccccaaattcgcacagttcgctggcatggaaagaaatgcgacaagcccgcttgccgtgacattgggggtatcgcgaagtgtaagagactgaactgccgggaatggtggaaggggtacgttcactgcaaatgcagaatcgtcaagccaaccaagatcttcgagcgtgagatcacgaagatgggggaatgaagcgattccgccgcgcagggtactagcctccatttgaactccagacagctcgagcacctccaaattcatccatagttgagagcccgggagacgtgagaaactgccctccgcaccttggcgataggccatgcggcgcagctcagggcatcgagccatcaactcctgtttcaaaggtagacacgatggctcgtcgctatacaaacccaccggcagatcaacaaagcggagattaggaaggacggagatagtgcgggccacgctggctttgttggcctcgcgggtcatgtatggcattcggagtgacaacaccatatttcccagcccctgtgactctcgcactgttcgcataaacaattccagacggacttgcggggcatcgatgggatcgccattgcggtcaaagaaagagcggcgttttcgcttagcggctaattcgatttcgagttcgcagtaatggacggggtcgattcggacgttggtgtaactggcagcagactggtgttagtctctcgcttgacaaaaggcccggggatctcctacagaagcgcccgcgcattcataaaccactgcttgttgacgagggtgcagtgtgccaggtcgcgcatgtcgcatagcatacagccatcgctggcagattcctcggatgtgccatatgtgttatcgacggcgtgcggacaaacaaaggagaaaataagtgccaatactggtcgaggtagctgtttggtgtaatctcgaccaggcacattaacgcggggcgatggtgggtcgggtgtttctcggtcacttcgccgtgagctccgtcgcgagcttcgtcgcagcttatcaaaaaggcccattctggctgggagggtgtgggaggatgtgaaaggtaaagaggggagatgattgggacaaagcgcgttaatgcagggtccgtcaaccatcaaccccccttcagcccccagcccctaacatgaaacacgggtttcatcacgtctaatatagctcgaggatctttgaagatctttcggatgagttgacacgcggcaaaaattatttctcataggtcgaatattatggagacgatttgaggccgcgaatttcatgacatcacggagtcaacagcgtcatttctaggaaatgcctacacaatccatccgatatctatacatggttggccattgactgacatcgatctggacagagactaggagaatatacatttcccttcacactcctcacacccctcaaatcaccatgcctgaaataagtcgcaacttcgtcgatcctcttccctgcccagcacgtaccaacgcaatcccagaatccacccctgtagaacactggaaactcctgccaccatacaaggtgcaatccgaggagcaattcggtcccatcaagtggcgtggaaggtgtttctgtggaaatatcacctatctcttgaagcgagagaaaccactcaatgccaaatactgtcactgccctgtgtgccgagttacccacggagctcctcttcagtgggcggcgatcttccacaagcatgatatgtcattcaccaatggtgcaagcggtttggcgttttattcttctacacatcgaagtcagaaacatatcttgcctaccaaggtgtcttgtgccaattgccggacacctatcatggatgaaggtcggaatatgtgtttgatttttcctcaattgattcagctcgagggatctagccaggagcaaagaaagaagagggaggttttcaagccgacgtatgtgcatttgctactactccaggagtgcatactaatgtcctgctagatgtcatatcttttatgagtcacgcatgctagatcttccggatggtcttcccaaatggagtggaatggcgaatgtcagtgaccggatggacgaccacggtaaccggatcgaagtcggaaagatgattgtataaacaggcgacaaccggatatggacatagaagttgaatatatgtacgatgttcccaaccaagcttgcagtcaccactatgaagccgcgcatacaccatcctgcaccgacaccggatcactgcttgcgctaccccaatcagcagcgccgataaccttaccagcctccgtactatcatccgctcgaatctatcgaaacatcagcattggctccacattgcaaatcaagaaacttacatagtactgtggattgacagagtaccaccaatcatcactccggaatgcagtatccagtgattgactcgccggatcgttccagccggtattgcgagtatcgaagtgagcatgcttcgaccacgacacatacaccttggggtgatcattcccctttacaccgttcggggttttggcatctccggcattgatctcgtcggtcgtaagggtgttttggatatcgccccaggccaggttgtggtacccgctatgcgcagaaagcagggcgcgtgatggtgcccacatgttgtcgctatcccgagagtggatgatcaccactcgttcccagtcactggaacgatgttagagttgggctgaaccacaaggccagaaagggtcacctactagtcatgcccagtgttgatgccagcaaaatttgcgccgtctttctcgtaaaagagattatacacgacgcgaatctcggtctcgttgcattgtcggtatgtatagtaaacgggaaatgcaggtccctcatttcggataccaacgccagggttgcgacaattgcacccgacatctgggtaatcacactgtgccgcggccggtgtcttgtgggcagcatcgtagacatccgatgtatccggtgagccgctgtacgcccaggttggatagcagggtggctggttctgggcttgcccaaagaaccagatgggcgcgtagcggtctgctagatctaaaccaccggcatcgaggagggagctcatctcatcatttgttatctgtgtgagagctgccactgccacatggctgacggccaggactgccaagctagctcctagcttgaactgcatggttggacttgggggaatgttatgggatacaggggtcgcgatttgaattgtccagtatatctctctcttaaatacatactcttggagacagcatagccaggaatatccaagacaattccagagaccattttccaaatggggtgatgagttgctaagggttacatcgcgacatgcgggtctgcatttatattagccccggaggtaccccgagatatcccgcacgtgtgtgcagtagattatctcagtcgctaattattagttatctggcttggattacggagtatcactatagcaccttagaatatacacaacttaagcaacttagagaccgtcgatgtgtatggaattcctcaaacagcggtgaagatggccaggtagatttcaatgggggctacagacggattggggagaaagcagggtagaatatatatatcttagtcgctcagatgatgacttcgtattgcaggcttatgaccctcttcagaagatatcacttcaggacttctcgtttaccaagtacatgcagaagcaatcccccaaaaaacctacaatggtggttgcacgaaaggatgtattgatgatctcctttcctctggccaacagatcattatctcaaacgatgtccgaaataaccagctagcatcatatttattcgttcctagctagtgttattattcatacatctcttcggtagctttaatgcaacaaaaacatcaatagcttatatcaggtgacttctattttgacagatcatgtgatcgatctctggtagatcaataagcttccctagggcgccgtcatttgtcggagaatacacccaaggagtcggacagcatccctgccactagaccttacaccaaatcaggctatatccacactatgtggaggtaaccagcgtctcgaggtctgtttcgactgatatctagaccctcgcccgtcaaatttccatcttgcactgatctagctaccatttgttatggcccttcgaacgcagcttttctggacacagttacgttaccgtggagaatcctaatagaggtctactggatggatgatctcgttgggagaaaagacaagagtagattctgttgtgctgatgatggacagagaggagaggaagagagacaaaggacggaactagctggtctatctaatagtgggtgaccgccttgccggccacccaaaacatccacatctaggtgccggaatgttaactggcttccctttcggcaaatgacgcacgagggcgcctttaaaacggaaattccctatgccttaggctcgactaacacatgtccaactgctgttcacatggaacctttccccacttcagtcatcaaagttctcatttgagtatttgctactaccaccaagatctgcactaggggccgttcgacccgggatcactcccaaggcttcgtcacggatccccacgcctgcctactcgtcagggcatcgtttctaccctgacggcgaggtatgggtctagaattttgacaaagttcggcgacaaagtcatcgttgacccgaagcaattggcaaggcttttcaaaaaagtaacaccaggggccgacttctgcccacgcgaacacacatgatgaagaatatcaatgtcggattgacgtgggcgaagatgtcaaggacaagcccgatcactataacgtctaccttcaagtcaatacccaggcagaaagcgttactagtgagccatttttggtaagtagaactggcgatacggaatgacccgaacacgaggttaaggtgccggaatacacacaagaggtgttagttcatttagacagcccgacggtgcggaatccgctaaggagtgtgtaacaactcacgggccgaatgaactagccctgaaaatggatggcgcttaagcgtgttaaccgaacgcgaggttaaggtgccggaatacacgctcatcagacaccacaaaaggtgttagttcatctagacagcccgacggtggccatggaagtcggaatccgctaaggagtgtgtaacaactcacgggccgaatgaactagccctgaaaatggatggcgcttaagcgcgttacatgctttcgaattctgagcggatattagcaggaatcttttgtcaaccggtatgagcacagatttactcacttccgttcggatggcggaatttaaaaggaaggagctagacatccctgagcactcttgcttatttaatgagtctaggcgactgcctatttggcccgtatctcggttcttcagacctccaaagccatttcaaggcgcttgtgagctgaaaggtgattggccttgaggtaatttcctcttcgcgcattcgtaagaaatctgccagtctattctcacgccagtcgacattctctggcgccgaattagcgccgaattattcgtcacgcgctctgggaatcggtcaagaacacaagcaatcaagcaatatctgcattcgcaaataccccttcgtcctcgaggactagcgagtcaggttcgatagcttcagaaatatctacgtattcgttccagagcatttggtggacttgttcattttctgtgtcgtgtttcgtacatatctacatgccctcagaactgttcatgctttgtagccggcagcatagcggcggagagagcccgggcgtaatggagaataggattaatatgtatctgtgtaggccgggcgcgtactgccagtcccgtctggttcgagtatagtagggggttttgactatgtaaaagtagaattcaaaagtggagaattaagtctagcaaaattgaattgatgccttctaccgcgtttccggtttcttggtcttcccttgctattctagtgccacgctgaattaatcccggtgatctgaagcttgacgttctgggtcactccatccgtcgagacaagtcgcgcttcagttgcatcttccttagggaatatctgagccgtcaaagagacctctccttgacccccaaatacctcaacactagaccaatccacgaagatctgcaggttgatacgtttatccgcgcctgctgacagtgatgtgtgatacaaggttgcaaaagtgtcgtcaaaagatgcatctcctgaatttcgccgatccacgaagacctccttgctggtaaagttgtagccgatcagtgtttcttgcttaaagtcagagctagcacggacagcgatcgcaaacgtagatgcaagagattttttggagtcatgatcggaaaagctcaagtcgatcttgaatgccttgccgggggagttcagtttggttgatcctttcgatacggatttccaggaatgttgcaaggtctggtggttggcaacactctgccagttttgttgcggttgttgaacgagggtcaccttcccattgatcgtctgcaatgacaactgacggggaacagacatggcgcttcgccaagggcttgtcgggatctccgtgccatactgccaattattcatccacgcaatctggaccacatctccattaggaagtccgttataactggcagcagcataaaagtccggaccccaatccatccagttggcagaactgtttcctggatagatgctagcaggatcagcctggaaagttgttccgtcgaagtcgccgatgaagtattgtgttcctgatccgaccgtgccaggtggtccaccaggattgagcccaagaacaattacccatttcttgattgatttctttcctttgacgggcagttgaatcaaactgggacattcccatacgccgccgacagagttgtagggtccgaactcgctggccaaggaccactctttgaggttgtcagaactccatatcagcagcttgtggagtgatgccagagttgtgacggctatccatttctgtgtatcgccatgccagaatacgaaggggtcccggaagttttcgaattctgcttcatatggagagggtgggttatgaatcacaggattctcggcatcgtatgttgtccacgtctctccctcgtcgagactataggcgattgactgggattgctgccctgcggtaatagattttccgcttggtaggtcttgagacacgggatactttatgaatcttgtcagtctccatcagtgatcaagtaaaatagccacgcgtaccgaagaagtatacatggcgaccaaaggaatctttccatccactccgaagccactcgtattgttcacatctgctaccgcgcttcctgagaagaacatctcggtgacctcgttgggatatccgcgagcaagtagagcaatcgggtgctcttcccagtgggtcaaatcgctactcgttgcatgaccccacgacatattcccccattcaacaccagccgggttatattgaaagaaaagatggtaagtgccatcgtgatatagcagtccgttaggatcgttcatccaattttcggcaggggagaaatggtattgaggacggtatggttcggtatagtccaggccggacgctgtcccgagcagacccagggccaatgcgagtaatatgcccattttggaattggaggaaagccgctatgcaaaataaacctattctgttctatcaggaggaaattcctacaaaatttatacatctgcgaaaatcgaaaatccctcatcccccacattccatacttcttggcataccccgtggggattccactgccctgcagatctcggggaaatacaaactctcaccccacattcttggaagagaacacttaaacaattggcacgcccggagttaactcgctgaaactcggaagtaatttcggagctgagacatctgctgtcttaatcgggtagtgttttcgcccgcatatacatatcgtggaggtatgtgcgggtgaattatgatgtgatcgaagttgctttacaaatgaagtatgagcaaatgagcgatttatatcattagggtttgccaagtcggctaaatccttgatgttaacttgacgatggttacttggcgtgatgcgattccaaggcacaccggaaataacttgcgccacaatattcttagtctaataaactcggtgagagaaagcgagaagagagatcaagaactgtctattggtatattggactaattgtctcgggagaaaaaagaggaaaggaaacatcttcatctaattgaattgctgagcaagtttgaagtgtagtccctcactcatagtacggcttcgcatttatgagcttgtaggcaacctccttgtcgtgaccgaaaatcaacgtcgcgttgtacagtctttgcagtctgcggatcatgttgagactgcggaaccacgcattgtgatctctagctaatccgccatggggatgacccagcgtatagttctctgcaacgtggaactggtccgaggtccaaataaatggtccatcattgaccaggttgacttgcataatgcagagcccaggtgtatggccaggtgaatggtggagggttatgccctggaaaaggtcaagttgcgactcggtgaaggtgttccactttagctcttctagtagcatatagtatgaaagatagacgcccaagtccgctccggttgctatcgcccagcaagcgtgcttgaactcttcttcgtggacatagattgggacatctgtgttcacgaaatgctcaagtccgccggcatgatcaaggtgcagatggccaatgatgaccgctttcacatccttgatgtcatttccagtggctttgatagcattcgggagtttattgttctccgagtattcaactcgcggaaagacatccgtgacgggcgctggccatttctgtattttgtttagttatacataatgacgattgcgatacgatccgacaaaccacttctagatcctcagcacagccggtctcatagagaatgaggccaacgcccgggtactcaataagagccgaaataagcactaaatctcggcgtttattcaccggattaaggttgctcagggtgcttgaattgccacctcggaaaatcctgtgcaagttagtaagaaaatcatgactttagcttccattggcaaacacaaaccatgattcatctgcttgaagggcgcccaagttcagaatgtgcatttttgtcccagcaggacacttgaatgctgggactgctgcagataccagctgagaggcagggtcaacggaggaattcatatttcaatttgaatagttgaacaatttgaaatgaaaaaagaaatatggaggaaattaaaaagtcatgcccaatatgccggcagatctgatgaagtcataaccgtagtcttcccccgcatagaccttggtatagcggccgaggagcagacccaccagatgcccagaagggaattgacaaatggaattgacgaataagaaggcaggatgggtcaagaatattgacttggcatttctgatttagttacctcggcaatggtaaaagccctttcaataggaaggtatcttagttccctgttgtatatggcttcttaaaggcagtctgccaactctgccacgttttcgacatatacaatctttagctatgaaagtcaaccctaactagataacatgtaacggatctacgatcttcatctatctttaacatcggtatcccagctgaccgaggtacggagtataagagctctaataccgctgccttccgctatcctggcactgtttctgtgtgcatatagaagaaattagccgtagaatctcatcgttttaaattataccactcatggctgcgcgtctatcgcttaaaaattcaccgttcctggactgaccgatctcgtgacatctcacgagctgtacgcctgcaatatttgccacccttcgatgcagatgcttagtatttagatagccaggctgccaatgaaaaccgtactataataggaaatgtccgctgttctgaaaacaaagatcagacaatcagggccctacttacatatctgccggactgccacgtcttgacgtacaccatttgcagcaggaagaacaaccaccgagcacaatcttaatgtctttctcgtgataatagtacttcatgatacatgcaacgaagataaataagctccgaattttcgtagcatatggagtctatttgctctccgttggtcacgtgtcgtggggtagagggcgaagttgggcagctagcatcaacctctaaccttcgggtggttgcgtctcttcttgttcactacaatttggtacagccaccaaaggcataaataacactattgctctgttggaaacgcgctcgtcccctgatcaagtcctcaagtactagatatctcccgaaagaagtttatcctggaagattttgaaccccaaatggtcgttttcaaatcctgcagtccagacatcttcaggaattcgacctcgcttgtgcttggctgggagctgatgtcccttgataacacacgagtcaaaatcgatgatcacgaatgtgtcggcttcttggcttgcaatcatgatgtttctcgtgtggatgtcattatggattagattgagagcatggagctgatcgagtcccaccttgatctgctggagacagcttttgttctcgactgagcgcccagcctcaaggcagccggcaagcgtctccacatatctctggaaacaaagcccggtaatccgcccccctttcaccacacatccaagatagcgagcaatatttcggtgttcattttgcatcaggacctggcagatacgagcttcctgaagcaggagcacactcaaaaatcccgaaccatcatagtcaaggagctggggctgtttgatgtaaacaactgggttatcggcatcgtgacatatcgaaagaccatcttctagcagaggccaaatgtgttcggcaggaatctccttgagacagctttcggcctcaggcagaatctcatctgggtgagcgaactttccaggcagctgagctgcaaagtacttgtcgccatcctggaagatgacattagtgtaccgaagctttgggctgccgccgagctcccagatctctgccatatcacgataatgcattgcggaaagggggaattctggcaaatttgaatcgaaatagatgtgcgaataatagaataggagattgcgagcccgccctatataagagacctaagtcgggcaaccgcatacgcacgaacctcctgtcataccgtaaagtgtagcggtgagatgactgcatcgaacatacaggaggatttgctttttagatgcagagaccataatgaatagcactcatatttggaatatatcccagcatggtggccccttttgggtgtggtctgagcgtccacggatccacggtagagtaaatgctgactaatattaatcggagaggactgatatatcacgtgactggatctgagcactctcattaaagcggcagctgcaataggaaagccctttgtatagtaacctagatacgtcttaatgaggttccaataataaagtatggagtataaagtgtgggaaattccctaatactattaaaagacaaatctcgatacatgttgcccaagatgttgctacactgtatagctctaggtgggacggacacaagactgagaacaagggcttgcacctgttcgaagatgagcagtagtggaatatatattgccaaattgcaggagaagtgaagttatccccaacctttaaaatgtatgttcatagatgtacggagtaccgagttagatccaatgacatcagagaacccacccaatcgcactcttattttcttcccctctatatcctccctcttagcaacatcacatctccatttcagctcatataacatgtcttggtcacagaagacttttactctccctactcgcagccgcggctcctacctgatcaccgaccatgtcctccaggaggtccccgagatccgcgactacaaagtcggcatgctgaatctgttcgtacagcacaccagctgtgcgctttcgctgaacgagaactgggatgacgatgttcgcgccgatatgagcgatgccttggatcgcattgcgcctatggataagaagggggatttgtatcgccattctgccgagggcgccgatgatatgccggtatgtgtttggagatagcaggggattgggcattgattagatcgctatgctcgcttcaggagtctagagtcctctgattatcctccgctgttattttcactctcttcgaatccagcactaattcaacacaggctcacatcaaatctgcgctcattggcgcttcggtcaatattcctatcacaaacggtcgcttggcaacaggaacatggcaaggcatttggtacctagagttccggacgagtcgacacagtcgcaaggttgtcgcgacgatccagggacagaaggcttgactggatggggctgagcgagggcaattgtgatttatctggtttatctgatgccccagctacgagtgatgcaagacgagttgcaagaaaaaaaaataaaggtttgggttggcgagatagtcgacatatgacccggattatacgagatcatcatatggtagtcgatgtaatacacacatttttggggacaataccatcatcacacacgatcgaagagcagcagatccattcatggatattctgtacacggcctcaggcccaaaaccaattgaaaaacgcaaattgtgcaacgccgataaagaaatctcatgctagccgtctatcgctgctccaagccaccctctgtcacacgctgagactcgttcacctcggcagcgtcaccggtaggttcgaggggatagctggtggcaggcagggacttcaggtaagcgcggtgctgttcatgagcctagagaggtgttagcaaagatccaatcgtagccggaaagaccgcggatatcagtggacatacgaaggggacaccgcagtatgtgcaggtagcgatctcgggcttgtcggtgttgatgaaaatcttagggtgaccgagagggccaccgccaccgtcacagctgacaaccctggactttgtccagcggacgggctgtctgtgaatgagctcgatagcagcatatggtcgcggctaaagagtagcatgttagtatcagtccttgaggcattgccaacagcaattgcatgagcactgctgttttcaacgaattcgcacctgggactccatgattgtctgctcaaagcgaggtccaaccatggctttctcgcgcggctgctggctggaggcccaggtggtagcgcggttcggagcctgcatgctccggatgcgctcgccaacctcgggggcctcctggagagtaccatcgttagtgggctcggcattggtcgcggagacattcggcgtgggcttccgcggggtcgggtcgttgacttggatagggttctcgctcagacggggcacggtcgaggagtatgcgcggacaacgaagcgtgggcgggccgacgcaaaggtcgcaattctgcggccacaggacatcattatgggcaagtttccccgggatggttggttatgacggaggataagaagagggttggcaagggaccaggtgcaagtcggcactgaataatccgcgaggtgtggtttggtgggtggtcaccgcttgctggttcgagatagctccacccagaacttggattttctgccgcgtcattttattttgcgtttcgcaagtgaagtggctcgacatctttctttctcctgatttttaaattggggtttgtatccattaagatcatcctttcaacccatcatggctggctcttcctccccggctggaaagcctgagaagaccatgtcgtcaactctattgaccatgaaggtatgaatgacagtttcttggttaacagccatacaactaacactatatcccagttcatgcgacgcgctgcagctgccaaagaaactcaaagcccatcttcggatgctagcccgcacaactccaagcgcccccgtctctccaccgaggctgagagcccttccacctcagatatggatgcgatcgcggctgcacttgctgccgaagaagaaaagcggcaaaaggccgtcgcacgagcagccgcagaggccggcgagacacactgggttttggactttcctgctacaccccagtccactcagcagcctatggtattggcggcagattcgctggatgcagatgatgatacccattccggtggtcggcgtgcatatggcaatttcaagcgcaaagagcgcaaagagcgcaaggtcagtattctatatcttgcacttgatattttgtactcattttttcttagcccgaggacgatgaagatgaagacaccatagtcaacccgtcgaatccagaagaggttaccaaaatgcaggaaaaatctagactcaaggcagaagccaaagcaggaaaaacacgacagacgaaactgtctgaactcactagtatatctggctctggccgagcgtctttgttgggagccccctcctctgacaagaaaaagaagaagcgcaagagctactaaacggatgattttcacgatcccacctcggatgttttgattggcgttttagcatagcatttatggcgttttggggttatatcaatcagttccttctcagtatcacctcctggtggtatatgcttagcaatcaccatgatcgttggcctactaggtatgtacttctttgtgtccaccatacgacaagtaaatcaatatctataagcgacgtagtcagaagttcttacttacaaccgtgtttactctcctatggaagatattgaatcatgtaccgggatattatcatcaagtattattcatcctcttcttataaaccaggtcaacatctatactctcggtcatcgagaatttcggactttgtacggcgatactgacgggagctcgaaggatatttggtgggacttgaaacacagcacaggatgaatgtgagcttacatggatatcgtaataagaaattagtagggccgtatgttcgagaggtgttccataagaacggaatctggaggcagcttgtttgggcggctcattgagacaataatcaatgtacattgtatatactaggccctaggctctgctaaggacctcactgagagcactacatagagttaagtagcgaccggctcttcccaaaaagaagcaagaagatcatctcaaagcttcgccttctcctcctgcttcttcttctcccaccccttctgcgtcgcgaaattcacaatcaaattccaagcagcaaccccaaccccaaccggcggcacagccaacaaggtccaagcccaccatttcggactggaagctgcaatactagccatagcccccctaacagcaacctccagctgtgctttatcagcatcattccaaaccactaccccgcgccccgtcgtcgtcccccggaactccgcctgcgtcgctttcgtccgcacatctccctgactctggacccggttcgctgcatcctcggctgtgagatgtgcatcgcgggcgcgcaaccgcgccgtttggatttcaggatcgtgaaccccgaccacgattacggttccgcagatgagatccatcccgctctcgaagaggagcggtacatccaggacaaccgcccattggccacgcaggtagtggtagattagggctttgtagacttcccaccgtacggcggggtggacgatgccgttgaggacttgtcgatcccgtttgcgttcttctgtgctgccgaaaatgcgccgccctaacgctggccgattcagtggcttcccgtttggatttgtaggcgcatcgtccaatagtagatctggtgtactagggccgaagtagttgacgatagctttgtagcctgcggtgccgggttcgactactttgcgggcgaggagatcggcgtcgattattgggagggagtagggtggtgtggagaggatggacgagacagtagacttgcccgttgctattgagccggtgagcccgatgatcagcattttagctttagaagaggagagtggcagaattgtaaagttgtaagaaaatgaaggtgctgaatgcggggagataaattagcctcggctccgcattaagcacgttttcatgtacgtcacgtcacctatgcagctatgcagtaggagattctggattctctaaattccaaacttcatccagtaactaatttgctatatatccgataacaaactttggaaaatctgtgtagtctcggttgcgaggggtatcctcggcgtgcacttgtagtcgcatgaagcactgcaacttgagagcgcatatacgcagagcaagacgcctaacccaaggcagtgaaaaagcgggcttatatggctgatatcttccatcatcaattcaagtttccggcaatccatgtgaagtgtcttgtacttggcccttccacccaatagccggccatcccttgggcagcgaggagaatggtggcagggaatagcggttgtcacagccaccttcccatggacaagtcagatcgcacagtccaaacactttgcagtagcattccttcgcatcggggcaatgtacagggtcctttccaaatatcactggagaaaatgtcagctttcgatcggaactgggtcattgcggggaaaacacatactatgccatgaatattccataattcgtccactcaaatcatcctctagcggcgtgtccgctagccatgtgcggaagcgctcgtagtcactgcgcggccgttccagcaccttggtgcgggacacaccaaattgcgcgcagcacgacacgcctacctcctctgggattggcatcccagggaatagctccatgaatccatacttgaagtattcgccagcgtgtacattgccgcgatgcgtatccgtgagaggacggatttccaccgggcatccaagggtccaaacacatcgtaggttgacatatccttgctcttgtaggtatggaatctggagattttgtagcggtggaattccgtcgtagtacgggtcgtcgttgtgccattgatagcgtcgcgagtggatgaagagcattgtctctggtagattatcgtaattgtcgatgatgtatctattcaacagctcgagtcagtatgcgagacgaaagataacatattgcatgtcgaactcacgtcaaatacaccatcgactcccggcctttgttgcgcgccaccgtcaatggtgcgtgcttgtcatccaccacgtagatacttttcgtccagtcggggaagtattctgacagccatgacgtgtcatcacttttcatgctggcgacgaccatatcctttcgtctcggtacagcagggcgagccagctcgcctgnnnnnnnnnnnnnnnnnnnnnnnnnnnnnnnnnnnnnnnnnnnnnnnnnnnnnnnnnnnnnnnnnnnnnnnnnnnnnnnnnnnnnnnnnnnnnnnnnnnnnnnnnnnnnnnnnnnnnnnnnnnnnnnnnnnnnnnnnnnnnnnnnnnnnnnnnnnnnnnnnnnnnnnnnnnnnnnnnnnnnnnnnnnnnnnnnnnnnnnnnnnnnnnnnnnnnnnnnnnnnnnngcgacctcgcctgattgttttgtcggtccatcctgtatctgcgcatagctgcctttttcggtcttgacgcgggactttgttgctgagaagaataaaaggtatagggcgatgacgatgaagatggtaaggaagatagccttcatgcgactgcgacgtcgagggccctgaggcccgctaggagcgaacaacatgttggatggagggcactctgcccaggtggtcaagtcattgaggggggagaagttgacgattaacgggaaatcaagggcccagggagctcaagaaatccagggaagacaagtaggatatacctgcgatgttaatcagatactaattcatgtagtatctgtgtaggtaataaatccttgcgattgtcagagacatctaggaggtcgacgtgtcgcaagttgaagttctccacagccaagctctaactaggcgctgcggtgaatagctccgagtccacaattatagcttatagttagcaaggatagcaactgtacagctataacggttggaacatataaaaacaagcatattttcaaattatttagaatgcatatattgatgtatttgatatgatagattgaattgatttaaccacgatatatacatctgaccggtagatattgtctttcccccaggacatactacctacatatccatagatgtattcaccctatttgcatgcatcaatatgtcccaagtaccaattgtgtgctgcagtatccggattcaacgtccccgcatttccagacttcgagcccacgccgacaatgacatcaatatcagacgaggtcaccgtcgtattgtcgccactagtaatccagtactcaggacttgcgtggctaaagccaacagtcgcgggtggcaccttaggcaccaagtcgtctgtatgtgtcactcgccagagactgccctggtctgtgatatattgagctagagccttgttacccacccgtggctggccataagtatactagtctcattgtgagtatacactagcaattaaggcagatttccaaacatggtacttaccacacttggttcatatccgccatttcgaagcacaatacctcccaacgtggcaagggctccgccatagctgtggcctgtcacgacaagagtgtagcccgagtatgttgcctttgcggccttgatcttggatgtcagatcagctgcgacagcctcccaggcttccaagaacccgccgtgggcttcgcaaccgctgcagatactactagcatcggtgaagccaaagttgatgttcgcgatccagttactcagtgtgcgactgcctcggaatgagacaacaagtagcttgtttgtcttgtcaaccgcgaggaagccggcaacatcaccatagctggaggtcctgaaaggtgtcactgtattagcgaacgacttgtgaatgacattggaagttggtctcatactcgtcaaactcgtatagagtagttgtgtcagcggactccaccaaggggcagttgccttgctcgcaagataccccatcgccggtggagttgctattgttcgtgcagtatgatgctgcagcccactgcgagaacagggtcaattgaccgagcacatcagccgacacatctattgcttgcgtcagttggtcaatcatcggatggcatgaacaaaaggcaaacgcatccatacctcgaggaacagaacgagaaggagcagcaaccgtcagcgccgcaagagcagcgatactccaaagacgaccaagaagaagcatgatgaggatctctggagtagggctttctcaacgggtgtgcatacacgtcaacacaaccacgcagacacagctcccttatgtatgttcggcgagtccaaatggatcccgtatagatcccgaagtccttcacaaatcaggacagcttgaggggcggggtatagcgcccgttctctcgtatattaaattgttgccggactcagctcaatctccgggcttatggcgcatatttcacgcgtgaccggtgggattccggcgggatcgacatggaattcatgcaactgttgagtttgtcaccgggaaatgtaacccctcagagacacatcggctgagtagatgatagtctgcatagtaaaatagcggagtatttcgtccaagtcgagattagggctgtgagtgggacgcttagttgcgccttgtaatgcaggacaaagttttgctgttgatttatttcttcatgcgatataagtgccgtgaagacgaatattttgggctctttgcatatcgggtagaaatagcttgcaaggttgttgattggtttctgcttgactgctccaggtggtgttcgacgatcttttctcatcttatactaatggcccgttgtggcagaagaaattccagccactcgcttccgcccgtgatcgtatctgtatatgaactgttggactgttgaactgttctagaggcaacgtcgaactacgacagtattattaaacacgtgtgatcattagaagcgtaaaattgatttgactgtatccattccattttcaatggaggttttttttggttatttctttttcccttttctctcttgagctctcgcaaagaattccattattggagaagcccttcttcgccagtcaaagccgtatcctgttcatcatcgctgccagcaaagaacctcgggccctcgggacactcggtgcttgggcccatactaggctgcgttagcgtttcattgtcatgagaatcactccccactactggtgagactcgatcttcatgccctcctcaactcctgtcataccggtgtcctgtccatcttctgcgccatcaccgttgaggataactcggggagggatagtgtagccaggaggcagtggggtgccaggggtcacagcaacgatgttgtcgttctcgtcgaccatctcgaagttgtatcgcgataggagatgggggatggcagaaagttgggggccgtagcgggcagtgttatcgtacagctcgaacagcgggacagccagcagtttcatgttctttgggaccgatagaacctctagaataagtgatgtgtaagcagtgtttaccgcccacgtgaggcatgggttggaactcactcttcttcgggaggcggatgaagtacaacttcttgcactccttgggccgggtgacatggccaggcaggaacgggtacatgaaagtctcgaagttgggtcgccaccattgcgcaagtgtatcgctaatttcccagtcatcattaacgccttcgccagagaactgagatcccacaggtgcaaggcgctcgttcaggcgcttcttgaaaccttcaatctcatcatcctcaggttgcagataatcacctggcctgaaagacaattagcagtgaactgtgaatttatgcaactaaatctcaaagaactcacagcttaaagaatgcattggcaatctgcagcatcagcacatggggatggttgtgctcgtggcacaccaggattccctcgcaggttcgtcgcattccatggaggccatagtgctcttcaaggcgcttgagccgtgccagaaccgaaggatcctcttccggctgtgtctccttggtgccgaaggtatagttcgacagaggatacagccggacagtctccggctgctgagcggtgaagtccttagggacaatgggcctagaaggtttgtgttaggtcgcattgccatttcggagtttcatccatactacttacggaaatccactgacaggagcctcctgcgtggtagtagccatttcgacgaagcaattgttgttattgtcgagaacggcgagctgtctaaagctccgatgtcactatcgcttatcagcgttgaccgccttcccaagttcaactgtggaacatcgagtatacaacttagtaagaataactagttaactaactaactatagcattatttggttacttgatgtaatttagagggcatgctactatactatatagctgtatatataaaaaaaatagcaatgtcgaattaatttaactctgtggaccttgcggttgagaaaccgatgactgactgtatgtaccttttatatgtgaagccctagcaaacggtacatttgacggaaaccctatgttatgttgtacacccacttgtcaaccttacaaggaccgggtgctataatactcgtctgaacgtagtttgtttgattattatccttcactatatccttcaattgacaaacaccccaactctcggatacatgcaacccagaccaacaccaaacctactccatgtataccattcatagcttggcatcaaaatcctcatacacgctcaaatccatcgcaggaacagggccagcgctaacaggcaggcttgccttgaaggttgacacatcggtgataatgacaggcttttgggcctcgccattgccattagccgcaccctgaatgtcactgccagagccaagacccagctcctttaactgagcactgagtttctcgtccagcgtctcaaggacgggctcgaacttctgctgcaacaggccggtctcggtcaagaaattcttcacagcaaagataacctgggacttgtccgccgctgtcgtgtcaaccgaatcgaatgccgtagtgaagcgggcagaatccacgatgaagtctgcggcttcgaggtgcttggtggctacttcgataaggcgcgttctctgttcagctggtttgggctcctcaacctgcgcgcctgcctgggcgttcatgtggatggcgagcttggcgcgtgtggccgaagaggggtcgatgtattgctggtagaatgtaacgagatccgccttggtcaaggagcgcacattggctgcgtcggtctcatgctgaaggaaatcaaagcgctcagatccgatatgcgaccagtaccggccagtctcagagcctaggttcttgagtttctccaggcgcttgttcacgacgctgcgcttgtaaccctcgaattcttcttcgggcatcttctcgaggatggaaccgaactcgcggaggaaattctcaatgcgcgattccagataaggtgccgtgcgttcactctggataatgatccggtagcccatagtgatggcgttgtagcgtgcgccactccacaccacatatccgagctgttccttgctgcgcagctggtcgaatgcaggttcgtcagtcagctgcgcgaacagctggaccttcgatcgcaggacgtcgtcggcgaagagcccgatatagaggaagtactcaatgcagtgattgacgttggccggatccttgagcaaccgggggtagacatagttggcaccgggcggcaagatcatgttgcggcgcaagtaccactgcgatggaggcagagggcggcctcccagaatcttctcaatagagtcggtcatacgcagagcatcctccttgtacaggtttccgtgggccagcacttcgatgtgggtctgctcaagcagctgggggaagaagttgaccacatcatgggactcaacatgctccagctcttcaagatactgctcattgatccagctgcgctcggcaagaagatagcgagtataatccccgacctggtagtaaggctgctggtactcagcattgcggaatgcccgcgccaagcgctctttgataatatcgaaccgatcctggttgacaactagcccatgcatagtgttgagtactttgtccaacagaacggacatcttgtcgttatatccgctcacggaaatgtccaatcccaaaatgttcgccgagagattgtagtctaagccagcaagctcggcgtcgtaggagtattcatctagcgaatcccgaaccaactcgctgtacagctttgttttgatgagattgccaggcgtggcccacaccaatgaattgcggagcgttatctcgacactggccttgggcacccagaaacggtcatccttcttgaaccatagacgcacccggtcgtcatggcgaatcagcttagggttgatagctggctcggcaacctccttcttttctaccgagagtctagtcggtacaaattcgttcttgtgaggcatgtgcacgttggaagtacgggtagcctcagtcgactctagagccttctgaagaccacccaagaactcctgtggaatcttctcgaccttgtattcggtaccataccacttctccttctgatcccatgtacccgggaactcctgggacacaacgatcagacggaagttgtcagcccgcagatagctgagcgccttcttgatcaggtcagagtcaaatcgtcgcaataaagacccgctcagaagccattcgttaggcagtgacttttgcataacgctgctcaaccggctggtgaagcgactagccggggtcttctgcttgaaccggaaattgacctcggcaaggttcttcatctcgtcgaagatccactgctcgggctcgcgttgcttgatcatggcaatatactcgaagacgacgtttgcgacttcctggtatttcttcagaccttcgggggtcaagcgcaccgagatagtgaaaaatgcagacccagcgcagacaggcatggcgcctgcagacagaccattggcccaccccttggtcttgaggtaagaaagaacactgcccgggccctcatggccaatcagatggctgatataacggctaggctgggtttcatgcatctcctcctcatcaagaaaggggaaatacatatccatggagcgagtatccataaccggcttcacaaaaacctgggtgcacatgtccttctcagtgaagggctgaacaccgtcccagcggttcttagccaggttcttgttctcgacatcggaaaagagctcggagacccactgctccagggtgtccagagattctcgtcctaggacaaccaacttcgcccggttggccgagtagtgcttctcgtagaagcggatgaactcactgcggacttccagaccacgtttctgtggatcttctttcagggtctgcagattaccagtcgagaagtggctgtagggatgtttagggtttgaaagcgacttgttcagttgcatcaaacgccacaggtcactttgaaggttctttttattttccgaatccaccgcctgcaactcccggtctagggttgactctaggaaaagcggggcaacaaagaactgggcaaaccgatctaatgcgccgtagaggggcgacttcccatctaatgcactcccatttgacacgccattgttatcattcgtctcggcaggggtgctgtctccactggatttcggggcactggagtcacctgtggcggacacttcaaagaagtagttcgtttcagtggcggctgtgtaggcattggatgaaccagagtgggacgccaagtactggttgtatgcattttccttcgggtactaaacaacagggatccggttagcattaaccctggctaggaatatggttgcagtggtaggttttaggttgtaggttgttaatttaccttttttgtgcccataaatagcaaatgctctacggcatgagccattcctggcatatcatcttcatcagagaagttgccaacattgacattcacggcagcactggccttatcggtgtccgggtcatgaactaggagggcctctagcttgtttggcaaacggatgacccgataagaacgatcatcaagctctggtctctccaagttctctgtaatacgctcgatttgagccatggttgggggtgtggcggtgaagtttggggttgaatgggaggatgaacggcgggtccaaaggacggaagaaagaatctgtaaaggtacgggccgcgctgaacgaatactggtcacagtaatacgtgacaacaaatcgggacaagggcgggttgagctgcgaatgagacctttgtgacacaggtttgctgcagaggaccttggaggcattcagttgccgaggggagagggagaggccaatgacgtgactgataaggtcaatgcacctaggaattccagagggtctaagaatgagacgcgttaatatatgcttcgatatatattgagtgggattataaaccaaatggaggggcctcggggtgatggatgttgtaaagtcgactgggagacaagcgatgttgatccagccgggcctggtggaaatactgcccagctactcgaggcggtgataggccctcgtagccctaatacgcgctctcatctaccgatggcgtttttccaaacaaggcagactcgtatccgaccaggattagacttaaaaatataacaatattcccattagcagatagctacatacatcgcagggtcctgggtggctccacgtcgaggctctacctttccccgcagctccgcaggccaaaacacaggggctagtggacacagtccccaccattatatcgagctatcacatacgtatggatccgggcgcttagcagttggctgcacagaggtccaggttaacactagtgtcggagttgcagttctttgtttggctgccaccggggttgacaccctgcgcccagcagatgttcgagcaagttgtgtctgtgggccgcacgacaatcgacttgccggagaatgggtcaccgaagacatctgacaggtcgtaccaaactgtgcctgggtccagggtgtaggcaaagttggtctgagggctgccgttgtacagaccgttgtcaacggtggtgatcttaagcgagatgccaccggaggcactatcgtggtgcagagcttcggtgtagctgccacccgccgggatggtttgcttggggccgacactgccaccaacggaccacaggtagactgggaattggcagtggttggtcacgatagcgttgccaacggcgctagcaagcggtgccatggcggcgacggaggcaataacggcagtggaaaagtgcatattggtaggattcagttggcttgaggtcaagtaataaagtctgttcgaggtgatgagaatatctctctcaggtaggattcgaagccctttatatagtttccttggtggattgagcatcagtttccagtctatacctggttctcctttgatacgagcataaactagattctaaaaggattgctaatgggaagaatgacggttacttaccaaatccaagacacctcatcccaaatcaacctattgaagccttaaccacttgggcagtggtcaggccatccttccttttgtatgatcttaccaaatccccgcatcacacggccaacagttttccaacattgatgtcagtggagatgcgagagataaaagggtccatgggtgtagcgaaaagaatacgatgtctcagagcgctccgacccgatcattggatgtatacattgcataggcaagagcaacaattatgagattagcatgagctttctgcttatgcatgccaagtgtggagagatagaaaaaccaagggctttctggcataacaatggaacgagttgtgtcacgcctggatttctggggtaaaaagtgagacattgttacatacatccagggacagcacgcagatcaacgccatactgagaaagtaattatacgatatgtatgtctaaattgagcagaaatcagctcatactcgccgctctgtcttggagactactaagctctagagccatggttggtgatgtgtcatagtgaagtcccaaatgtctcaaaactccaaaactgtgctgatataactgctgcagaggggcccagggacttcacacctgacgtcttctctgatggcggtggacgagaaagtattagaggcgacaaatatcaaagagagaaatgttttccacaacccgttgagaaatgataagcaaatatagtaacaggactggcaagataatttcatgtcattactagggtatgaaaagagggttcttcgataacagaccgcataacaccatgtacagccttgggaattctacggttcacgctcgccgaatcgatcaggaaccagtaaaagcaatcacgaatcttcgtctgagtcctcctctgtccggtcagcacgatcggatatccacttgaacacttcctccttatgctcgtcaagcatctcgttcaggtccgttttcggggaatgaaccagctgtccgtagcgcttggaaggccgtcggtccaggctagtccaaataccatgggagtctgaaacaaacacaagggagttctgaaatgaaaataatagcgtgagtaatgcatatcattgacgaatatattgtgggtggcttacctcgcggtaccacttcgagagccacgtctgcgtctgggatgcgaccgcgcggacggggtctacagacacgaaggagatcacgccgttgacacgcttgtaaaggttttctgcttggtaattagcaaagctgcatagccggatacccgattggcctaaacatacccctgttgattagcaagttcgacacgccaatgaaagcgttgccgacgccgagcaggaaaatttcggttgcctggttcgcactttggtaacttgtcagctcaatattaatcaatgttcttcgccggtcatcgctcactcgatgtagttgtcccacaagtatccggcaagctcttcggtggcagacgggcggtcctcgtcgtccacctggtatttaccggcagtctaaacccatccaaattagttgattgcccgtataaagggttgcatagcttgacttacctccttccgagttacgaacttgggaatgttaacatcgatcaccgcgtagcccttgcccacgatccatttcacataatccgagagcgaatcggccttttgttatgttagcggacaatctcagtcaaccatcttgggtcacgtaccagccacacattgtgcgcttccaacttattggtcacgggatgagcctgtcccacaatctcagggctagatactgtcaattatagctctggcggttgattatcggaacacttacggatcgtggaagatgacaacaagcggcacacgttcgtgatagtttgtgctgccagatggtgagttcaggttaggatatcaaggttcggtgcaacttaccttgccagaacttgtttgtcaaaggacttggaaatggcggtgcgataaatgtggagcggggtgagcttgcaggtttcatacagctggttcgactggtgaacacggaggatatctagagggcttatcagctctgttgagtaagagatagtctataattcttaccgtgaagacgattcgcgtagatcgggtgagcagatgtcttggggtacaggcgactccaatactgggattggatgctcctcacccggcggactgttgcgaccgcagagtctgtcggagaactgctcaacaaacggtcagggggttcccccataagggtcttggtcacagccagagccgacttggagatagacttgaagttgtatccaccctgtttcaacgtcagatcaagcaagcaacaatttggagaggcaattgacatacctccaagcaaacagcgatctttccattggccaaagtcatgagcatgtggatcatttgggcataacaagctggcgagacaaagcaggcacccagtacatcgccagcggcagcatcaaacccagcagcgactgtcatggtcaataactctatactagataaaaagagggggtatgctcaccaatcaccatgtcgggatcgaattcttgggcaatgggcatcaccacttcctggaaggcgaacatgtaatcgccatcgcccataccctggtcgggccatggaatattgacatttctaagaagcgtgagactttagccatttcattcatatgcttgaggaaaaactcactttccgactccggcgcctgagccacattgatctgagtctccagcagggcctccagggtagaagcgaccgtcttggtagacatgcatggaaatgtaaagaacattagggtcctcgtaaaatgcttgctggatgccgttgcctaagatctgtaagcttggattgttttcaaatgtcatactatgggtctaagcataccatggtgaacgtccctagcacaagttagtatttctgcagtgaccaaacggtgatgtggggtactactgaccagtcaagaatcatgatcttccggcaagcgtctcctagtctattttggcaaacgcgtgctgcaacagacacattgttgaatagacagaatcccatcgcagaatcatgctcggcatggtgaccgggtgggcgaatgacggctatagcatttttcacctgacgttgggcgacggctaagcatgtctcgattgcgcctccagtagacaaaatggccgaagcgaaggtcagattattaaagtagatggagtcacgttccttttcgagctgaataagttcatcgttggccatatctattgatcgagtcagtgaatctatccaggccagcttttccggtagtagcaagacatacctgttgtgcttcgaacaaatgcgtagtgcgcttcatcatggacgagggtgatttcctcctcggttgcattgcgagcctggatccgttgcaaggttttgggtgccaaaggccgactcgattctgggtcgtcaacaagaccggcgcgacataactccttgtagatgtagtagatgcgtctgggatcctctggatgaacgtcactctgtggacaaacctcgcagtggtaacgcatgcgaggatcataacaaagtcctgaggcaagcgacgccagtggaagacccgccttagccatgacctcgtcgtcagaccagtcagagtcgggctcaactaggctatcacgttttgacaactgttcgacggtgaaaatatcaccttcgccgatcttggtcaaatgttcaggaggggccattccggtggaggcgatggccaccggaggttgagattgctcggagccaggtgttaaggatgcaggaatcgcttggtgaatggaagaaggaggaagattgggagtcgggtgattgctgagatgcgtgggaagatggaatcggtttgcagtcaaggtggaggtggtatgggaatcacccataactgtatcctcgtcttcgtccatcatgagaggggaagccgcgggaagctcttgatataattcaagcttggctcttattagctcattaccaagaactaccacaatagaggtgttgagcttgtgttggcaatcttggagctcaatatcaaactaatagtgattcggttgatgttcctggtccaggctgtcgaatgcgctttgcacagcagaataatttgaaatatatcaatcggtcaaatgttccacttgttaaacaaagattttgtttcaccaaatattataggaatgtctgaaggtgcgatttgagcaagcatacggtggtataccaacgtctcctgccgtatgttcgactgacgctgcaatgcacccacagtatgatgaagcaagagtgatcttcaagtgaataatttctaagagagattcaattatagaccttcatgtagtgggtaaaaatgaagaacagaatccaagtccactgagtgacaaagagacaagggaatggatcattggatcccttttgggccagtctttcttattgccagacattcttgaagtcaccgccaaattgaccgccgctcggaatggattggcgtgatatattataattggcggtgagcatttagtatgtactgacttatcgttatcaacaaccttccaaggtgcatggataagaacagtcggcctatacggcctctatacttgatgagctaggtatttacatagttctaaggttagccagaggtgattcagctatgacacattgaagatgatgacttttgtatgaattttcttggatatcttctcttatcaacatctagacagaaggaatgatagatcacagaccatggaatttggtggaaggcataatgctacaaaacgacatttccatatataacatgtgatgtacccagttatatgtttgtacataggtacatatgcaggtagttaagacatgcagcatacttccaatggtcaacatgtaaaagcttaattttggcaagtgtgaaagtgcctcgggattagattgattgtatatgtatatggaggcaaagccattccaaccaaaatgattacgatagtacagctctatagcagattggagaaaatgaattggaaatggttggtttcattaaatgacgttatcatcttgtttttttctaccaggcggagtcctcatgcacccatatccgtaggctgtggaacaaggagctcagcaccttaaagaacactcttgaccccatgacggggtcctgattcctactgggaatccacaccggcaatgtaggagatgaggtcaacaacacggcgagagtaaccccactcgttgtcgtaccaggagacaagcttgacgaagtgggggttaagggcgataccggcggcggcatcgaagatggaggagcgcgagtcaccgttaagatcggtggagacaacctggtcctcagtgtagccgaggatacctaaaatagtttgtcaatatgggttgtagacgtgatcgaaaaaaaagataactcacccttgagctcgccactctcggaagcggccttgatggtggccttgatctcatcgtaggtagcacccttctcaaggcgacaggtgaggtcgacaacggagacgttggcggtggggacacgcatggccataccggtgagcttgccgttgagctcggggataaccttaccgacagccttggcggcaccggtggaggaggggataatgttctgggccgcggtacggccaccacgccagtccttgttggaaggagcatcgacggtcttctgggtggcggtgtaggagtggacggtggtcatgagaccctcgacgatgccgaagttatcgttgataaccttggcgagaggagccaagcagttggtggtgcaagaggcgttggagaggacattgatatccttggtgtaagacttgttgttgacacccatgacgaacatgggggcatcggcggagggagcggagatgacgaccttcttggcaccacccttcaagtgggcactggccttctcctgggtggtgaagacaccggtggactcgacaatgtagtcggcaccggccttaccccaggggatggcagaggggtcacgctcggcgaagaaggcaaccttgtggccgttgacaatgagaccgtcatcaacgtactcgatggtgccgttgaactgaccgtgggtggagtcatacttgagcatgtaggcctattccgacgggaggttaatatcgggtatacaatcggttgggttgaccagaaacatacagcgtagtgagtctcaatgaagggatcgttgacagcgacaacctcgacgtctgggttgaggagactatattgaggatgggttaggatggttctcgggtcattttgttctctctctctctctctctctcctcctgcgggttgtaacttacgcattgcggaagacctgtgatgctgttagtgactgaagctgacctgtgatgatccagagaatgacttacaatgcggccaatacgaccgaaaccgttgataccgactttgacaaccatgattgcggtttactagaagctgttagctcaggtagaggaaggacagacaaggaaggatagagaatggatggacgtactgtaatagtgaagtaattgaagaaaggggaagaagtgggatggagagagaaaagaagaagaggaaaaaatatctgggggagggggaggattaatgaatggatgactgacgcaatggacagatcacgcccccccgtctcaccgaatcaaccctttcactcccacacagcccgtcagatcagaccgagctagatttcccgaatgttgccgttggcacatccgcccagcaacccatttccggtttcatacaccggggaaagcaggaagggccacgatattggggtcctcatctgcccctcggtagctcccgtctaccaataggagcccgctagacccaactgctcttcgggttctcactacgcttcggagctttctcttgaatcttttgcctattcggtgcctatattcgggtatacggagatgagcacgataatcttaggtacaaatatctgtaggcgttcccgaggttgactaaggaagctatgacgatgtggtttggaggggtcgatgaggggcaggaatgtaagtgatacaacataggtctacaacatatagaagggattgtccagttaaacccgtagaattaaatatatcattattattatcttctttcgaacggaaatgctcgattcctccactttggcgggccaaccgtgccgcttaaaccactgcggtggacggatcgagtatggtgatctaacttggtggctccctccgccctgaaaggagtcaccggtatctcacatggggccacgagactctcatggtttttttatttgttgattggaattatttcatttgagcttgggagggatttgactactggggtacccaataactattctaatcattggatgatgatcaaatgccgcaacagcaccaatcacaaaatgagatcctacaacctgtggtatctcactggtaatccctcatgcctaggtggtagctgtgggagcccagacctcatcagcccatatcaacgtaggatgcggagccgatacaccagtggcgcaatgtccagatgggtgccacgactgagcgtccttttgtacaggatctagatcgtacaatctgggggatggcatgaccacaggattcaagaaggattaaagatatagtccaggcccgatccagaaaaggagagtctggacttgaaaaaaaggatgaattatggattatgatacaatggggagaaatgaacagtgtgctatcattcatatcgaccatcgaatacccatagctaggggaaatcaattgatggcctagagcaacccagcgtttgtatttattcctccttgacaccaccgcgccagttcttctcggccgcctcgatggaggccttatcgctcttgggtccgccctgggacatgaagccaccggcggccttgaagggacgggcgagatcaccagtagcgggcttgccgaagacgtagatcttggccaggttggactcgaaagcgcccttgagggggatgatcgactggatgaggagggggttggtgtactggaagtacaggtgcatcacgcccatcatgccgacacccatcagctggctgcggatcagctggcgcagctgagccttgtcgtagtccatgttggtggtcgtcacgggcttgggctcctcggtgctacccatcgtggggggctcaacgtacttgagggttgtcatgtctgggggtatcgcgttagttttggtttttggtcatggagcacgcgatcgatcgacatacccttcttttggttgatcttcaggtgggtgtacaggtggacagccaggatgagaagattagacaggatatagcatgcgcgcaccagcatcaagacttgagggtcctcaaagggaaccttcttggacagctgcatcatcaccaagatgatggcgaggttggtactgtgcgaccatggtcagtttccgcaaagatagatgttcgatttgaatcgaacaattgtcgatcaagcatacatttgaggagacaccattttgccggacacttggacacttttcgatacggggaaatcgttgagtatgggggagacaacgcgaacaaaattgaaagccgcgggccacctggcatttctggaaggtcagggagtcggaagaacagttatcccgacgcgatctatccgctatcgctatctgatggcctgaggcattttatcttgtagcctgatacataaggctagtatatcatgtgacctccccctgccggtagctggtagctgtgatggtccagcttcaaaccagaccagcttatttgcaaaacatcagcaccaccacaccagtgaacttatattttggcttagagttacacaatggtgtgggttatgacaactacaggggtttcgtatgtgaatacggccacggatgccggagacctccattgcaatcggacggctcaaggccacacttggcttccatcatggtctcctcgaataccaaaactcactatggcttctgtctatttttgagatagagaaaaacaagcgataaccttcacagcaactgatttctagatcattcaaatggctccacagagggccatctatacaggcaagaaaccgaatgctgagaaaggacggttcccctttgggactagcgccaagtgtctttttggcacagtcggcgcctggcacattctgacttctccatccatcaacaacgcgcgtattttccgcactctgaatcccctccacgtccccaccacggccagatcgtctcgatttctgtttctatctgctgtacctacctctgcgaccgtcttcgcacatttatttcgcaatggctggtggaaagggaaagtctatcggtggaaagggtggaaagggtgatgctgcggggaaagcccaaaagtctcacagcgcaaaggctggtctgcaggttagtgggatcatggcttgtctattacttggctaggaatcatttcatctgagagtggtaaagcgatacgggcgatgagttactcgatgaaactgcctcgaagacgcgtcgactcggtccctcgttgctgttcgataaggggtagtttctttcgctatacgtgccgtcgcacgccctctcttccgaccatgttttcctcgaatcgccaacggtttcaaatgacgcgactactaacccattttcactctccagttcccatgtggacgtgttaagcgtttcttgaagaacaacacccaaaacaagatgcgtgtcggtgctaagggtatgctatgtcgcttggacggatctccgacgtgacctgtcgctaacactttttcccacctagccgccgtctacgtgaccgctgttcttgagtacctgactgccgaagttctcgaactggccggtaatgccgccaaggatctcaaagtcaagcgtatcactcctcgccacctccagctcgccatccgtggtgatgaagaactggacaccctcatccgcgcaaccatcgccttcggtggtgtccttccccgcatcaaccgtgcactgctcctgaaggtcgagcaaaagaagaagggtggcaagatcgagctctaaatcaacctctgaaaagttccggaaaaaaatgggctggcagcgggagtagtcgagacctcaacacctcgactcccagccctccgaccaatcccggccgcccttttttttcagtcctctcgtctttgtttttcatggcgctctactttgatatattttttctgatattccccggtctttgctttcaaacctgcttttttttcattcgagttcatagggcgctgtaatgggaaaatggggatatcctggtagtgggaattttactgattcgatgtgcttcaccttcactaactatgtggtaattgtaggaattggagtaattgtagaattatgtattgtagattttcacgcagtcgaattccaggataatgcttccgtgatcggaccgattatcacattcctgaggggtcaaatattgatagacacttgaccttgcatataaagtcacgaactttgttggctccacgggggatcgacagggacaaatatgcataactacgataaacaacgcaacggaaccgcgtcatttgttcttggcatctatattttgggttaataggttcgtttttgctattggaaattcagattggaagtacagagtagaggttctattgtcagaatatttacacacaactatgatctcgactcacctactggtaggatagaagtcaggttgaaggtagatggattgaacagtgagaatctgagtacaaaggcaaaggcaatggaaaaaaaagaaattgctggactgcaaagacaccaaacaggaagaggaatcccttcagaatgggagttggaaaaatatatcaacatcactgacacaggaatgcagaaaatgcatccacactgcataaggtagatctgtagaatcggcacagtcgaaggcagcagaatcacaatatagctgtttcagaaacagcagtggtccctgatcaccattccgcgagacgaacgaccaaggggaaagcagtcaaagcacgcggaaaagaaagcaaaaaaaagtgaaaatgaagaaacaggcatgtcacaaccgccttacccggacagatcgaacatgaatttccccgaaagattaggggaaagcggttgtcggggtaagacgggccagaaacattaaaacggatgcgagtcaccccatgtacaaactaaaacagacaagaatatgcaaaatgctggtattgtcgtttcttctgccatcggcaaaatgtcttttgtgtcattcttcgtatgcatcccatatcaccaggaggcgttcggggtcgtggagttcgttccgacacagcataaatagaaatccatggatttgcatgcaaggcgcccgcaatatcagaaagtgttggaaataaaaaaaatatcagtccagaacaagtccagagtcttcttgaaactgtgtgagtcggggaaaagttcaaaagcgttcatccaaaccgcgtgtcttgggctgccccaaaaagaaagaaacgtctaaaacttggctagatcagcgaaacagaggattttctggtctttttttttgtgttgttgtcatctcgtcatccctcatcgaatcgtaagccggtaattcgcagaacagggactcgtaatacaagtcgtattcatctcgcggcaaatcagtcggatgctggcaataaaaaggggagtcgccatcttcaataaattcgtccaatgttctactccacaatgatctctactccggagttggtgcggagttcatcacttccgcggctttggtggccgttctgacggcgaaacccggggcccttgtcgggggtcgggccgcggggttggcggacgggcatgcgctcctgctggccgtcatatcccatactcatgccacggttgcttccaatggcgccagcgttggattgctggctgtcctgctcccaagagaacatgcctcttaagcgacgagggctcgagttggggccaccgataccggtgccgagggagagaccacccaggctgttgaccagcaggttgtcatcacgctgcatgccaagagaggagccagactggacaggggtgagggtcggggtgttggaagtaccagtgggcgcaccctcatactggaggcgggcgccgttggactgcaacgcggcggggaagctagcggaggaaggcacgggcgaaggagtgtaagatctcaggtcggcaaaggacttagcagcccgtaggttctggccgttggcgaagttgccaggagagtccatcacgcccagaaagcccgagttctgtccacgcaaggtgttgaaagtgccagggccagcctcttggcgagcctcgccgaagtcgatggtcgccgcccggttaaggccgcgacgaccactgtctgactggccagagggcgggattgaggacgtcggggggctgacattggcacctgcggcgatcttaaagacttgcacctggcgctgttcgccgctaccacgtgaagcatgtcccaagcccatgttgtgggccagggtgtgaaccgtgcgacgctgagagggggtgaggttgtgggggaagatcacggaatcgcggacagtatcttccttaaacaggagtagttgggagtagtaggaaagggtctgggtgtcgttcaagtccacatctattaaaaaagacatggttagcgacaggtcgagatttcaataaccttaaaacgaatgtgttaacgcaccaattttttggccacgctgggacacgggcgaaggggaggtggccgggatgtgcgaggtgagtgaagacatggagctctgcgtctggagctgcggaccacctcccatcgggcggtgctgttcttccaactggccacggcgttcccgcttctcacgctcgatccgttcgcgctcctgcaggggaagcatcttcttgtattcgactcgtaatttccgaccctgtagctcaaagtggttgagcacctcgatcacggttgctgtttcctcggcggaagtgaagttggcaaaggccagaccacggaagacaccattgtcaaagtgatagttaaatgcgtagggcagggggaggttgagttccgtcatcaactgtaccaactgttccttctttacggcaaaggggatattcttgatgacaatcgcggttgggatcaattcatcgtcatctgcagaggacgcggaggcttccggtcgcatcgcgctgctctgaatgggaccagggcccagattcgaaaatgcttggggcatattcggttgctgatccaaccaagtctggagaagcctgttagtacttttttcctttttcgcctttttcgtacctttggacgagggggtccattgtcggataagatcaaacataccgtggggaggccggcacgtccacgggcattaggcttcaaactggcggaggccgagcggattcctccgagagcttgagcattggcaaacccgttggggttccaagtctgcgagccagatatatcatatccgtagttgttctgcaaggacgggttcaagcgttcgaggcgagcggactcgtaacgcatctgatcttgctcatacatgttggtcggcatagggccgtacgcatcgaactgtcgagacggctgacggtgtaggggttgttgatgcctctgagacccaggggaacgcgcagaatgatcgtgatacatgtcttgttgataactcatcgagaattccggagggaggaatgtgaaaatccaccaaaaccagttttaaggaaataattgtcactactccaccatgagagcgacgcaaggcgtggaagttgaagagaaaccgtcgagggacgggattgtgcggatgttttgggggaggaaaactttggagtaaaagccgatcggagggagattctggggcggagaacgagaaaaaaaaaataaaaaaaacgaccaaaaacgaccaaaaattcaagacacaaatccaagacagaatatcttcacgagatcacgaaattaaaggcttcgttttcattcaaggggctcttgttgctttgctgtttctttttttccctttggccgaaggtgactggttccgtgtgttcggggaatttccctttggaaactggctttcccaatatcaaggcccagatgaaggagacaaaagacaagagagcggggggagagagagagacgaaaggaattcaagagggaaaagcggtccacaggtccgccaagaacggaggggagtaaggaggtgagttgtagaaaagacacaggcacagacacagagagaggagaggagagaagaaagagatgcgatgatgagagatcgagtcctcaggcagaaagcaggtgatccgttagatatgcagctgttttatattaaaccagtaagaaaaaaggatgaggaaatgccatacttatagcaacttatagtcactttatatagtccacctctctagtttatattagatcttcgacttttattcccccctggatctttatgtggactcgcccaatgagattataccatttaatcttcgactgcataaacaagtacaccgtacattgcaagtctaagtacggagtcccggagtggtagatattgcttcatgcttgaatttctagtgtatccccttttcctacatccttctggaatcatcagcatcctagatcagtcgtttccccaaccgttccagtcacctgagtagctccttatcccaattccgaattccccttagtcttttcttttaccaaggagccggtgcctcgttaggctcgtcactaggcgattttagaggaccccgctgtggtggaccactacttagagcttctcatccctgagcagattgggggaaagtatttcgatttcacggagtacggaataatactccagtagtccagtactccgtacttctgacatactcttgctcatttgcagtcccacgggttgcctgacgtatagaagtcggggttcgcgccctgcctcgtgcttttgcaagggggtgcactgcactatactgtatgttggatatgtgattctctatatttgatacaccggcttgcactttgcatatggagtatttatcatggactccgcttccttttaattactgtacgttgtactcccgtactccgtattatctgaatgttccatctccttcagggggggttttctattattactcctgaggttagtttcccccccctaatttcatttcgccccatccttccacccaaggcgaatccatgactcgccaccttatgaacaagccacctgagttattttaacagctctccctaatggttcggcccagtcggataagccaccttattcccccatcggctgctgcagctgaaagctagtatattgtgtcccactccaggaaattggaactttcgtccggtacccacgatccgcgcatcccccgtttctagcgcatgcgtcgaagctcctcagaggctcatatcgttcagctagaacccgctagacgctggttaaaccatttagtggcagtgtcagatcccggtcgggtggagctccggacctcatgtggccgagctagaacccgctagacgctgattagaacatttgctggcagtgtcagactcagatcccggttgggtggagcgctggagctcttcggctcgtggttactaccacaatcgtactcggaattgacatccccgtcttccgtacggagtatggtcgctgaattcagattgacgctagaaaagactacgggaattttggctttggatggctctgattcgctccggttgtcattcccgtaacaagtactccgttctccgtatggttcggggaggttgacaagagggatcgtatatttcacacactcaggtacatctgctgaacctgcacgaccttctgggagtttgcgatcagcgacccaaacccaagggaaaattatggtagtggattgatctacagaggatcgggtcgggtcgcaaggacatccgcgtgcttcaggagaaattcgtgacttaagagggaaagcaaccctggtccctggctagctctatgaatcctaacaacaggcagaccttgaacagaggcaaacagcccctgaggttcatatccacacaatttgaatgaacggaggctaacttggacatccgacatgatcctcaagcctaggaatagaacgataggtagagactaaccacagatattgaactgcaactcgtataggaccagtctggaacatcaaagaaaaaagacaaagaaagtcagacagctgcaccaggaaaaggcaatatccagatgtcatggctgacagtaggctccccctggaaaataagacatccttctaacacccattcttgatctttgaactgagtcaaatttgtgtccgtacgagccattcttgaaccaagataaccggagtcacggtcaaagacatccttgaaacgacaggctgtcagtttcaagaagaaaccaggaaaggcccaataataacgagactaggccctggaatgaggcctgagaaatcaggccaagaagcaactcatcttgaacgtattacaacatacatcgtagggactgatgcaaggcgacaatggaatatgtaatattccaaggcaaagccgtttgaaacgttctagtgttgcatgctaaaccattcgttgatcgcatgcagcattatgcagccttaggtccgctccagtcaaaatatcgcgagttttctacctgtagaatggccggtcgcataaccagccctgttgtgtctttttgatagtcctattagatgtattttttatcgatatcttctttcttaagtcttctgatgtagacggaaaacgcggaaaaggcatgatttgacttttctatgtataacctttgatattgaagtagtaccgtagttaaatatttcatatattgcatattaactacatgcatctcttgaagtaattcaaaatcaaaagatcgacagtttcatgataacaagatccaatattcgacccgagtgagtgacgactgccagacccacatagaaagaggttgcactcgccggattgagacctgagcagtgatgatgatttcacttgaagcaaatgaaaagtggccaaaaaccaagcagataagtctgaacatattttctaggcggaaaggcacctaagtatactgtcagatagggtacgtatattgcgtgtagcaaccacgcggccaagctgacgggctgaaggctaaggcgttcgaagtggagactaacgtccagtttaaaagtgcgggcttttcgcttcgactcggagttcgattcgatttgctcgatcctttcgatttctgatcttcaaccctccgcttgctggacaatgcggactctagcacgagcggctatagccattgcgctaattctaaccctgttttgggtcaaatcccacctcgaatccatcctgcaatggcgaaatgatgaatataattccgatctttatgtcctaaatggcgatgcgtatatcgagctggtctcggcccatactgcgacgcccgcgacgccatcacatacccaaacccggaggaaatggtcccccacggcccgaccaactcctcgtctaatgatagccaatcctgaaccggagcgcatccccgtcgatgtccccggtgctgaatgggcgggggagctatggttcagatctgaagaggaacccgaattctatgattcaaacggattcgacgatgcccaactactcgctccagtagagcataatgatgtcatggcaccttcgtctactgccccttctcgtccaaaggtcactccgaaatcggatcgcatcattattctggggaagatgtcatacgaagacactgattggctcgaggatcagctgccagagtatgcccccatagaccaatcactagtcgatcacaaccgtgccaattctaactgaattctagatggcaacacgcagtttacctcgttgatgaccccgaagcatccctgcaagtcgagcaaaacaaaggcaaagaaagtagtgcctacctgcaatacattttagacaactacgacaaattgcccgagtacatggtcttcctccacgctcatcaatatagcggccacgtcgaattttgggagcaggacaatgtgttgaccgtccaaagactgcaactcgactacctccgacgagttggatatctcaatctacgctgtgactggagtcccgggtgtcccgacgaggtccagccatttcgacaaacggctggtcgcacgaccgagcttgcctttgcgggtgcttggatccgtatctttaacaacaccgatgtgcctgagatagttgctacgccctgctgtgctcagtttgctgtgaccagggagcaagttctccaacgcccacggaccgcctatgagtcgtatcataattggcttatgacaaccgagttggacgacgagacgagtggtcgtgtctttgagtacatctggcacattattttcgggcaggatcccgtgttgtaagttgtagcccacaaaaaaagtccagggaattgatgttaacccgactgtgaacagttgtccggaaaaggctcagtgttacaaggatgtatatgccatggattatgaagagtcggctatgaatttctttgatgatggcatctggggcaattggtacgatgaagcacctatggacgaaatacctatggatgaaatacctatacacccaacgcctgtgaaggaaacacctgtacatgcgacacctacacatacaacacctgtgaataggatatgattgtatttatctaacggatggagagcttctgggatgtatcaatacctggacttgcgctaaagttcaatctgactgctttttagttctgttcctgtatattatttaccttttctgcttattctagccagtcattgacatatcctccccaagtgtactcgatcatagctatactttctctcactcgggtcttttccaaaaactcgaaactgtcaattgcttatactatggactatatcaatactggacataaatcatcgatatcatctgaaaattcaaaggaaaacattggacatattcataaaccatcgagtataccttcactgacttatctctgaccgagctccaaatccgttgactcacagccaagcaaaagccatcagccccatgaatcctaacatggatgtagcaccgggagccgaaatactagctgcagcatcaggagtaggagtaggggaggatgcagagcctgatgaggcaccggcggagtcagaagatccggaagagacagatgaagtagagtcctggctgcctccgctggtgctagaagagtcagttatggttgccgtgcttgaagtagcagtgctagtagattctgtgctggtagatgtgccaatcaaagtagtggcagcagcagagtaggtagtcgtagtaagcgagcaagagcggacaaggtcaagggcctctgattaatgcattagatttattttgtatcttattagtgtattcacattatacacaccgttatcgtcgtcattatcatcgtcgtcgtcatcatcattgtcgtcgtcgtgctgagttatgttatggttgcgcctgtcggtttgatactgggtgatgcaagcggagcagagcggaatctcggttttggcagcatcccaatcacagatgcattggatctcagctgaatctcgttcgtatttggcatcacaactcttggcaattccgacgacagagctgcaggcaggccagcagcggttggggacatcgtcacggtccaacttggatgcaattgcaatgctagcaagtaagagaccgcaaatagggaggagctgctgagtatgcatgattgttgaagttgatgattgtataataaaaaggaatttaattgtgtctttgttcttgaccgaaagcaatggcgaggattcaagacatatttatattgttgaaggttgatataactcttgttcgctaagcccactccaagcaactgggtaatttattttcgctctacatgtagaagatattattgtcggcattctccgcacgcatggtcagagttctgaaatagaaaacagacctccaaggtgtgtccacccttgtatcgaccagcggagtgccgccaatgttgattgtgtaaaagtagctgcctggtttatgccatcagccaagactgcgccaagagcctgaatggaaattccgacgagatagtactaataatatcgtgcatttgggttctgcgttttgtatatttttctatcaatatgcaggcaccgtggctatgctctatccctgactgagctggcccattctgaaggtttacaatctttcacttactccatacttcatacacctctccatttgccaaggaagggtcttattccaccccggagatcctatacggacaagcccacctgggcagtgtctaagccacgttgtggggctaatcggtgcataccattcaaattctgcaaccttgaccataggttaatcgacatgctttgttgtagctgtgcggagtactctatatcaaactttgagttcgagaaatcaagtttaaacctatatcaagtggaagaagctgcccatgtgggttgccgatagccaccattctgctatatatagatagccctgaagtatacaagcgacgataggtgctatatgaatggttaatctccaggcttcaggattcttcaaaagttcttaaattaccgcttgtcagtctatcgacaccattcgatatgatcttggcggcatacccttgacgtcgctcgaagtagcttggtaaacagctagtccagactaaccgactattgataattttgccgaatttgaggagatctagtgggcttattcgagtcgccatcaataacactcacgaaccgacgagatatgaccggcaacgtgtacgagttggccaggacagggctcagtagaactcgcatatttggtcgctatggcctcaatcaccgcgttctggagatcacccttgtcctctaatattttgaatggcagctctgtcctgacccgatcggtcatggaatatacagcagcctgtccgagacctgcagcactcaatgcaaccatagcagcccctgcaacttctttcagtctccgaataaaattgacataatgctgctgccgtggcgatccttcttcggtagctgtggcgttgaggtgcctgaaagcacccttcacacgctttgcttccgtagctttgaaaccccccctttcccccgcaagctctgacacgcccaggagcttacgaacagcctcattcactgtcagtgactttgggcgatttgttacatgctgaaatgatcgggccatcttgtttgatagtaaaacagtgggaggtcctaccgaaattcaggtaagatcgatgggaaagttgcgatgtgatgggctatcggcggaaatcgatcggaatcaatggaaagacgaattgtaatcacgtggtatatcacatggccgcaactatcatgcggtactacgttggaaagactgtgaagagtctgcttggagtgggaagagagctagaatatcctaagaaacgtggctcactacctagccttaaatgtgaggcgagatagtctcagcgtagcatgtgcaaattgaccgagtgaatttctttgacttggacagcgaagcacaatcgactgttacctcacctgcatattgggagcattcggtgtcagttggctatcaagtattctatggcgtaactgggatatcttcattggaccagcaaatcaactggcgttctgaacttgagaagacttgggaagaattgataattggcttcgaagacgcacatatgttgcagccacatagttctttcaatgctcctattggaactatcaatcttcctggctatactagggtcgttctaagaacttgtgcagaaacgggtgttgcgttgtgtctcgcaaccacggaaatcaaattctgatgctatatatactaagtattaccatcgtatataagaagaaagagataaaaaatgttaggaattgacaagaaatatatgtggtttgcaggaataactagagaaatcggtaaaaatgggtctatatcggcagtttctgaagtattcccgtgactttgatccagagtccataatcaacttgtgctcagccgcgattccgatattgtcgttgctatgaggtgccagattgactaagaagaaagagcacattcaactaaataactaagatagagaaagaatgaagaagtacattgcaaagtagaagcagttgatatagttgagcaaacttcgaacgtctggcttagctatctaacaaacaatctacttaactagttatgtgaatgcaaactagtaagcgagcaagcaagcaaacttgaatgcctttagggttgccgtgcccaggtgaaacctaaccatgttgttagtaagaaagcgttgaggtggacccccgcaatcataacatcatttccaagttaaacgtacttctgctctcatttctaattcaaccaaagctacccaattaagtaccccttctcaattcccccatcgacatagatgactcgagcagtcgggaagatgtgggaaaaatactgcttgcgtccaactcggggcactatctccaccaccatcccagttttcatctacggcacagcctggaagaaagaccgcagtgctgatctggtttatggtgcaattaaagccggttttcgggctgtggacacagcggcccaaccccgccattaccaagagcatctcgtgggggatggcatccgcagagcaattgctgatgggatcgtcggccgagcagacttatacgtgagtggacagctgcgatttttaacttagatatattcaggattgatagctaaccatgattaggtgcaaaccaaatatagtcctgtctcggcacaagacctggccaatatgccatatgatccatcagcgacggtgactgatcaggtccatgcatctatcaaatcttcattgcataatcttcgctcaaatgttgaccccgactccgtggatgatgcctacattgacaccgtgatcattcattcgccactgtcaactttagcccagaccctggaggcctggcacgcccttgagacctatgttccccatcgcatccggaatttaggaatctccaattgtacattgcctatactccgagaattatgtacgtcgtcgcagacaactgtgaagccatcagtggtacagaacagattctacgaggatactctgtttgatgtccccctgcgcgcgttctgccgcgagaatcaggtcatctaccaaagcttttggactttgacagcaaatccggacctcgttcgctctgagccagtgcagaaacttgctcgccatgttaagataactccggctgctgctttttatactctggttatgggcttgaaggatgtggcggtgctgaatgggaccaagaatgagtcgcgcatgaaggaagacttgtctgctcctaaacaggtcgaggatttcacacggaagcaacctgagttatggcaacagattttgacggaattccggggtttgataggggaatctagttgcatataaaaacttgagcaagccgtgtcaaggcttctgcggggaacagttagtgctcaatggtagtgcttactgcaaaaatcaaataatcgagtagatgtaagtatgaaatggcatcttgaaattgcaattgtgaactctaggctcacgatcctgagatagcgaccagttcatctgtactgatacctgacagacacgcgcgatcacatggcaaaatgaggtacttgtaagtactcgtcaccacttatcttgctgactcagtcaacgccatccgtggccggaccggggcaacttggatttgccgccgagtggcatgagggttcatatttatcttgttgacaatatagctgcattcgtttgattttctcttggtcttcctaccttgtgcctctagagctaaatacttgccatatcaactcattcaccgcccagtgggcgctttctgctgcagcctcccgccttattctggatgttggacaattcacgcgcccattgagcatcatctgcctagtattgatcactgctggtccttgatttgccgcctgctatcgattcctgtgatccttcgtttacttcagtgtcgatacgacaaatttcgcgctctgctcagtgttatccactttttccacctctcgcttctgtggtcaaagccgtcgactcaaattagaaccgacttggatgaaaaacttcctgcatactgagttcgcttccggttcctttgtctcctaggcaaatttcctgcggccaactcagtctcctattcagagactaaagaaaatcgagatacaattctatatcgaaccccaccgcgataagagtcattacgccagcttcttcacgatgagctcgcaaggaatgacccgcaagagaccagcaccgggaacagtaccgcccgtccatcctcagatgaaccctgtaccgaactttccgaccactgcgaaccccgggtctcagctctcgaacgatcaattcttacaatggggccagaacccccccgtcaatgccatcaatacctccgccttctctgatcccacctacaaccccgtggccttttcctcaccgcaggatgtctctgcacctgctgcgacagcatccaatcaactcgcccgccgacaagcgaaccaggtggtcagccgaaatcgtggctacgagcaacctcctgcttcatatgtggaaaatggaggcaacaatggaaatggggagagtggcgcatggggggagtctctagaggagctctatcggcgagccttaactgcgaagagagattcacaggcaaaacgaaagcaaatcccgccatttgtacaaaaattgagcaggtatgatccgacctatcgctttgtgatcaattatagggctaacgaatgatcgcagtttcctagatgaatctaagaatacggaactgattcgatggtctgatgatggcaattccttcgtcgtcctagacgaagatgaatttgcgagaacattgattcccgagctcttcaaacacaataactacgcctcatttgtccgacagctgaacatgtacggctttcacaagaaggtcggactttccgataattcaatgcgcgccagcgagcggaaaaacaagagtcccagcgaatacgccaacccctatttcaaacgaggccaccctgatttgctatggctcatccagaagccaaagaacgctgggggtggcggacatgcgagcaaacctagcaagggcggcacgcgcgtgaaaacggaggatattgaagataacgagatggacgattatgtcgaagagggtgcaccggcccctcgcgatacccgtgctccccgaccacagcaattgtcattagccacagacagctcagtacccaatgatcaactttctggagtgtatcgcgaacttcaggcgattcgtcaacagcagtcaatcatctcaactacaatcaccaggctgcggaaagaacacgagcaactctatgcgcaggcagccaacttccaagagcaacacactcgccatgagaactccatcaatgccattttaacattccttgcaaccgtgtataaccgcagtttgcagggggagggcgggccacaaaatctcgccaattcttttgcgggagccatctcgcaggaccaaggaaacatcgtggatgttgatgatgactaccttaacaatgctctaggatcaatggctagcccgagtgcccagagaacaatgaagaagccgccgctacttttgaaggctccgcccgcagcgcacgcgtataataatcgaccctcaacaatttcaccgtcaggcagtggctcctatgacacgcggtctcgtggtcatgctcggcaacccagcgccaaccagcacggccatgtggaggaggtgtttgaccacagcccacgtactgcaaacgtttctccgggacagccgacagaccagaattcccctcaacgggacattatgtctgtaatccaaaattccaatgcacgcaatgggctctcaacaaacttctccgagttccccaatgtgctctcctccctggaaaaccacggtggtaatgttcccctcacggcaaatcaacgcgccgatatgcttcgactcatggccaacgaaacaaattcatcagaacccaacgctggcgtatcgcccaacaacgcgcttatctcgccgaatccaccccttatgccgcacaactactcgggcaggctagccagcacacgacaagaaatcgacaacctagtcaagatgcaagctgagcaggatcgttctgtccagaacttgactagtcttctccagccgctgagcccgaatggcaccatccccggtatcgatagtgagggcaatgtacctcctccgccgctcgaccttgaccaaatcttcaacaacgactatttcaccgacattggagacacagggtccgatatgaagaaacaggagaatccaatggaccatttgggggcaggccagaatacacacgatcctatggggaccacccaaggcgatgataccaacgacctgttcgatttcgatcacatccctaccgagcctgatctttttgaaacccctcataatgcgcagggtgatcccacctacaactatggttttgacggtgttggatacgatgaatctgggcgtgtgatcgagcagctgacggatagcgaaaccaccagccccacagccacgggaaattcaagcgaagctgtaaatgatggtggtagtgcgtcgaaacggcgcagaaaggcgtgattctgccgatagcatgaggaagatcagaacggagcagattcacaaccacggtgtggatgtggacaaaactttcggcgattaggcgtttttcttgttgatatgaggtttcacatacctggagatgtgactaggctgtaaaaacctatgatgatccatgaatgaaccaattcctggaattttaatgagatacctttgctttaccttcttcttccttaatgagtttaatgtacataggtagaggtctttccagaacttttcggaaccctcgctcctccctttttttctcccagttgcttcatcatcttatgagtccatcgagcactgactttctacaaaacatgtgccatattgtgccaacggttgatcacgagatctggtttgcctttccacgcccttcgaagctccaatctatcctcaccttcactcctagctcattagcaaaaacacgaaccaagccagggttctgctggaaccaacgcctagcctgcactgcatcaatgccaggttgcaccagcttctcggccagaggccccgtttcaatcccgccgacagccgttatccatagcttgtcgcccacggctttcttgacctccttggccaaatgcacctggtaggcagggcccggtttgatagcaatcgcgaacttgtcttgggatggatgccgcctgagctgatattcaccaagtcaatgccacattcggctaagagtgggacgagttgaaccgattgaggctgtccagctctcgggaaagtctttcttcaattcatcgttactgaattcgaaccaatcagtcgcactaattctgatcatatagaggcattgcttccgggatgctagcgcaaattgcctccaaaacttctagcagtagtccgattctgttaacgcttccattaaattagcggagcactggttcagtagtgttatgcactgatcacaccagaggcgtgaccacaccagaggcgttgttgtaaaacgtaagcctgtggcatcaccgtccctctattattctcctcccaaatcttcaactcgaatctctgacttcaaccctctaactccctcgctaactaactctgtaattgacttgcaaatgcctccgcgtcgccctcgaccaaagctctctctgtgggtccgttttcgaagatggcttcgctactggagctcacctctccggctacgcggtagtctcattcgactcaaacaccaacacaaataccccatactgacgctccttcgcttgttcattccctatccgtcctggtacttcccgatcccggaacgattttctcttcgcgaattgattgaagacgaagaaaatgggacggggataatctcttcccattttggcgccatacataatcttcgctgtattccgatctggcgaatgcgggacacgccattacggtctatttaccggctctacgagctccatctcgcggatcggtatgagctgatgggctatgaaaccgagtatttctttttccagagaaactggaagcttggagatataccagacccgagagatcctgatccgcttcgttatgcgatggtcgcttcgatcacggaaaaactacacgaagcagtcaactggaggttgagcctcggtctgcggagaaatcgggagcacgtctgtcgggaggaggacggagacccatggcctcctttcatccctgaagaactgccagactggacgaaaagtgtgccgcctatggataaagatctattgagacgctcagtaccatcagagtcactggatgccgaggggaatctggtgctcgagaagaatggcaaaggccctaattttgcacggcgcaatatcatcaccaacacaggttggttctatacaatctaagagcacacttgaacagttgtcatatcaatcatcaacttcatgggtcgaattcaattgaatcagcgagcgctagcatccgtgacatcctctttgaagatatcctcgtcatattcacgacgttgggcgtcagccacttgatgcattgtcctatagtcgggaatcacgtcgaacccgttcatattcattgtctggatggtctccaaatccagcgggccattatttcgggttctcggttgcttcaaaagagcaactgcatccgtcagatctagatccgcctttcggtctcgcttcgcagcatatatcctcctcaatttgcgctccagggcccattcaatcggagcggccaaaatttcgaggttttctcctttgaacagcgttatgtcctgtttctcggctagttcaaacaaggtctgtcgagtcttcttcgttacgaagatagctacggcttcgttgatccagtcagtggggaagtgtagtttctctgccacagacatgacagcctcatggaaagcattctgtatctccttgtcatcggcaaactcgggatcgatcagataatcgacatcgcctgtgctctcgcgattcttgagataggacaccgcaaggaacccacccgcactgatcagtcggatgggcgcgaatgcaatgagccagtcatcgcgacccattgcactatcgagtgctagaaggcctttttcttttcgtaaagttggcgccaaagacagcctctgtatagtactgtttttgggtgtatcttaccctcttcaaaattcttcgaatcgagatatttctttcgatcagtcatgatggacactgattgaaaaaacgagaagaaatatgagtttagccgatgagatcgaaaaatggacaggagatgagatttatatggcagaagccttccaaggttagaaccccatacatcgtcattatggtgtgttgctttcaatcatcattggacacatgggatacaggatgcaacgaagctgcgaggcgaacagaataaccaatcccaggagtccctggagatgcgcgtgtcttgaaactgcctttttgtaacgttggaagacgccggcacttacctgcagggcatgtagcgtctggctaataatatccgacaagtaagattctagtacatatgtgggatcaggatattgataggctaatatggaaagacttgatattgagagaaaaagatcattcagcgccccttatcccattccaaatcaccgactcgctctcgtttacgctcgcgctctctgtcgcgttggaatccccgctttcgcccaaccacttccttctcgcgctcgcgaggatcaatcaccataagtgaatctgcctcacctccatgctcgcgcttccagttcaagtctttgcctagggtatctttcccaaaccggagttcatgcgagagccaaccgccgtcttgctgttcggggtcgtccgcctctgcctcggggtcatcccatgcctggcaggattggcagtttgcaatgaagtgcaggtcgcagagttgggcctcttcgtcttcttcgtctttcttttgattttcggtgtctttgtcgatgtgacttttgctatgtgatggtgtggcagttggttcgggtttggctccttcgagcttggctttgaaggcgttaaagagctgcaatgcttctcgttcagcggcgctactaggtcctgtcccgttacgactggaaccatttgcggttcctggaggtggccgtttccgtcctcggatggaggtctcagggatcatggcttcgagtgcagacttctttcggcctgtgtccttaggaaccaggtcaacgtcgcggcgcattgacgccatcagagcggcaatctgagcgtttgtccgcgacagcttggactcctttgcgggtggggcgtccggggtcggagaccgagtaggcgactcagggtcaggcagggggagttgtgtttctggatctggtgtcgttgggcgccttttacgctcggtagatggcgatctatctagagatggcgaccggggccgtttgcgcggctgtgatggagcatctgctcggggtttggggcttgatgcgtcgggctttgcacctggcgcatctacgaccaaattggtgttgaatttcggcttcgctgggcgcatgggtatttcttcgtctccatcgtctccaaagctcagaagcgtcttcccgcctttgggtcccttcttctttttcttgggtgcacctttatccgccttcccggcagttgagactgtctttctgtcctttaatttgccctccaaaggccccagttctccaacctcgcaggatgtcaccttaatcggataaacaggacgctcggtgcccgcaatgcgctcggcgtctgcaatcttcaacacattgtagatactgtccccttccagtctcccaaaaattgtacattgcccattcatctcacgctccgtgtttgctagcgtgatgaaaaattgactgccgtatgtcccgtcctcgctcttggccattcctagcaagccacgtcggttgaaacgtaaccgactgtgtagctcatcgcgtagaacgacgcgctcatgcgggtcccgagcttcaggatcaaactcgaattccgggtattcatagatagaagttccgccggagccagtgccggtgggatcaccgccctggatcacaaaatcgggggccacccggtgaaagattgtgccggcatagtagttgtccttgcagtgctgaaggaagtttttgcaggtgagaggggcctggtttgcgaagagcgcgagctggatggggccaaccgttgtgttgagcgtcgcagacgcagtgggattgggctcgctggcgtattgggtggacatgatgggcaagtaagctaccggtttacggcgcgtgccacaagtgaggtagcctgaggatttggagtgtattcggggatagggacaccctcttatagtgttgcgattcaatgtgttggtttctccgatcaaaagctcggagggaacgtcatggcacgtgacgttgatctagcccttatttacttggtgtctaaggacagttttaggaacataaaactaactgaacaaggaatgagcatcatttcttttgacttcagcactacgtgacacatttcgcacatttcctgcagtatcggaatgagaccccaaagcacctatgcctggctaggcagcatgggatgggagtttgagcgttgggcatggaattttgtcgcatttgggaatgatcaatagcagagggggccaagacattttcgggtgggtattttgatttgctggtgggcatgtcgagcgcatgctgaggattatcaggattgaatgtttggcagtgggtgctgtaggtggttgaatgatccgaggaagatccactcccggctcaccgagtcgtcagtccgagatcttgctttgtgaggagatatttgtcgttggcaaatgtcttttttcagttgggcagtcgaagcttgcgtcagccattgagaggctaatcttggaaggacatgtcggctagatgggatccaagaaaatggtggagacttgggatcatcattaccggagtgttgataaagatcgagatgaacggccgtaggtaagtcgcatggggagtggtccagtattgtcgcgtagggtaagattactgataatcgtggtgatttatcgcgtgggatattgcttgatggaacccaacggaagctcaagcttcagttccagcaagtcagattcacaccggccgtcccctccgcccggggttgtggaacaatcatctgcttctgcgtctggtcctgttcctggtgctgctcttgatccgaagccctagcatgaaggcctaacttgaaccgcagacggcgcaaagtgcgttcggagatagcgtaaccttctttctgcaacatgttgagcatggctttatcggtcagcctatcctgtataaaaagcatcttaatgcgcgcatgcaaagcctcgtcgcctgtcgtcgtctggtgtcgcttgcggatgccccatttgcgaaggcgggactggatggttcgttccttgacttggatattgtgacaactttcgagggtacggctgatagagtcgctactgatgccatggtggtacagagtaatgatatcatcccggtagggttctaaattgatttgttggcgaggcattctggggttaagaagagaagagaaatgcgaagagaagagagttggggagtttcgagttgttgacccaaggcggtgaatctgcggaatagtcacttgtcttgatctggatatcgtgatgtttttcgatgttttcgaggtgagacagatgtgattgaaattactattatgctcattggcttggccagggacctgaaactgcaaatcgaaagaaattggatcagatacgcttcacggaacatcccgatacgattacatactactctaggctctcagatgtcatggattgtatagtgcgaaaaacagattcaacttattattgcatttcatagattcattacgcattgcaatcttaccaagcaagtcacaatctcgggattcacccattgatctgatccattcggagaaaccaacaattcaaacctttttacccgcctccatcacagacgagctcatgacttcagggctaggactagccttgttccgctttgcaatgcggaagccaccaagtaggaagaagatagcctgcagaccaagaatcactgcgagggtaaccatggcaccaatgacgcccgccacagcgagtgacattcccgagccaccagtgctagaggtactagcagagccggagtcgctgctggtgctgtccgaactggcgcacttgccgtcggtgttgccacacatggtacaccactcgtcatcggaagtaacggcgatcgccttggtcttcgaggcaaagtcgtcccaggaaagaagctcgcttgattgaccgtacaatgggtatacggtaggctcagaggaaccggttatggtaccattgtggaacatgaagcgcacgctcaggtcggacttgtcagttgggaagtcggtgccactggcattggtcaccagctcgaagaccattgacgaggcgtagtccgggattccggtgaagttgacggatgcagcaggcatctgcaaaagaccgaaaagggagaagatggtgccataggagccgaatccgatgctcagcttggacgtgcccttggtagtgatggtttcgttaagtccggccaggatttcgcctgccagaacggcgccgtcgatggcgcgcactttatcggaggagttataagccaggttgaattcatggcttccagctagagcaatgagctgatgatatacctcgtcggtcaggtctgacttgtgagggaattgactggtagagttatggatgttgccaacgttcaagtagtcgaagatggtataggcgttcttgaatgtcatatcagacgaggcaaatgtactgtccagcataggcgaaagcgattggtagaactccttggttgaggatagcagcgaggtgtagatttcggagaaaaagtagttgttgctgctcacggtggccttctggcatccactggagccttgcaaccaggtggaatcctcggcgttcttgcttgtagtggcaggtatcagctgaatgagctggtagccgtttaatggtgcctcgaccgaggttccattggccagggtctgggaagccacttttcccacggggggatagacgccctgtaggaagccagtggcagagttctgcagcacagtatccgagggagcagaggcactgatctgctttgggttgaccacatcggcactaatgccctcgatctgcttggaagagttcgacaagatgtatcgctcgttgtaaaaagaaccggtctcaaagacctcccgatagcccaggtcggtcaattgagtactacccaagacctttggcgtgcgatctccatggcgggcgaaaatatacgcacccaatacacgctcagcatcaacaacgggggacaaagatgcagccagtaaaaggccagactggatagagtaccgcatcgtgaaatattgggagtaaacaagaaattaagaagcagcaaaatctgcgggggtttaccttctttatctagtcgtggatgtcaatgtcaagctattgcgggcaagaccccttgactcttccgatttttcgctttttttttcgcttcgagacccttgcgattgtaagcttggaagcggggaaagaagataagtccctgcagtgtctgagaatagtctagtggacgaatctcaccaagtcattggttaatacggagtctgaagggagtcaacaaataatcattagctaattcttgggaaacattgcatctccgcggtaccgcggagctatgatagcgtatccatacatagatagagaagaattgacctataacagataataaaaccgttgactgcttactaggtattaaatatgattctcagatcgaatttgcggatattcggatattcttgttcctgttcgcgctccagactccatccagtacccagattgtacatttatatcgtgacataaaattcagagaaggttcagatcgtatcgctggtccttatgccgtcgtgacacccttggcacccattaattcacatccatttcgaactacaccgacgagccctccagtctgaatggcttcagaaccaccccctgcaagtcgccattcaatctcggccagtccttcaagccacgtgatacgtgtttgggcgggaacttcgagctgctggagttgatctgctagcgcggaaaggatgtcggccaaagccagacccttggtggactttagggtttgcacggtgttcagacaggaagtgacatcgctagtggagaggatggtagacatgatttcttggatatcggacgggtgcggcgcggcaatgcagtcataaatcgtcgcattggtgacaatttcgggctccggacgaggggctttcggggcgtctctcatcggcagcgggatacctaaaagataacattagacaattaggatgaaggtgaccaaggagagaaaggacatgagcttactgctggcaaagcatgcctgaagcacgtttagggctcgtcgcatatcacctttgctcagggtcactagactgtcgaccgcatcgggctgtatcctgacaccctcgttctcaatcactttgtcgaccaaactccgaatatcggcttccttcagtggactgaaccggaatcgagtacaccgcgacaggagtgccggggacagcttatgtgtgtagttggcaatgacgcagaatcgggtattggccgtgtagcgctccataatacggcggagagccatttgtgcggtcgacgtcatcgcatcggcttcgtccagaatgataagcttaaaacccgccagaggggagccgggagtgccttggggggccatggtgaagatctgtttggtgcctgttcgtattcacggtaagcttgtagttcataactcgagactcctagagcacgaacttgcaaaggtcttgatttgttctcggacaacttcaataccacgatcatcacttgcatttagctccaaaaccatctgtcgcatgttcttggtgccgtagattcgccgcgccagggccaggatggtagaggtctttccggttcctggtggtccatagaggaggagatgaggcaatcgctggacgagaatgttaatcagaggctatcgtacatccggcatcgtaggcattcgttacgtttgtctccacgaaccgattgatagtcgcgaggatgtcttgatggccagagacatcatccaggctgcttggtcggtatttctcgaccctgggaagggtattagtgatataacacaatcgaagcaattcctaaaactcaccatggcaaattatcttgagcttcgactggcagatcagcgacattcctcttttttccactggcgttgtcggagctaaattgcacgtccttgggcgcatccacgtccatttcatcctcgtaatccgacatagtgaatgtctctctcttgggtagagataaatgatcaatatcaacaggcctatcaagagcaggtaaaccgtgaaaagtgcccaaaaggtttgacgcgtggagcgcgtaaagaggctcggggcggaaaatcatggagcttgggaactccacagatgacatccctctgcctaacctccaacgggtcaacttgtcccctccgcggtctctttgattgaacctcctacgttttaatcatttgacgctttcaaaatgcctgtatgttccctacctttgtatttgtccaaagcctgttgttaaccctcaatgcaggcataccactccatcttcctggaagaccgcgatgtccccgtgataggtaggagactcctatcaagtctacacagagttcccgagctacaaatcgacatttcaaggaccaaattgaccatcgaatttctcctgactaggaaactttcccattcttcccctccgaacccgtactcgcggccccgcatacacattgcccccgcttcctaacaccgacgacctcgatgtgtcgcccgaaagtgaatcatatgattgtgtcgatgagatcctatcgctcttccgtgccaatgtcttgttccgcaacttcgagatcaacggccccgcagaccgcatgctcatttacgggactctgtttattagcgactgcctcggaaaggtcaagccaactatgactgcccgtgaggcggagaaggtaaattttgatgctatatatcaaaagcctgatataacagaatgatcattgacaatcgtattcctaggccctgaccaacgccgccctcgacagctttgctattcccggcgatgtgtcgttcccccttaaccaggcctttgaacccccgcgtgaccgccaggatgccgagacgcttcgccagtgagattcttgatgctatacattgcaactcaatatcagctaaccggttcttgcttccaggtttatctcgcaggtgcgacaggagatcgccatccgcctacacgctagattataccccggtggtgtcgggccatcaaaggtaagaggaaggaaagaatagactcctcgatatctaccaaatactgaccaactctagttctggctgagtttcacgaagagaaagttcatggggaagagtctctagacgacgagcgttgctgtatattgtttgatgaaattcagcgcatgaatgaatttgatacttgattcaaaatcacaccaagcgctttgcgtaacttccagaggcttggatgggtctacttgcatatctgggagtcaaaattgccctcggactagcccttactcgatgtccaaagaaagggtagcagctagagcaagtcggatcacacgaaagatcagaagtaagttgttgtaattgtacattaaaatgctattggaggctattttgagggcgttcattcgtgaaacctaggacgtcatctccacatctcgatcactgatcggggtagatgtcgtttccacctttcgtctcttacgaacattcccagcagcctggatattctgggtggtagggaacacgcgaacgccatggaagagatatccctctgcgccaccacgtccagtcatgaggggatgggtccgaccgggcagtacttgccaagggcgcacacgcgacgtttgcaaggtaggtggaagaagaatcgtcggatcaaccacaaattcttcatggagtgaggataaatcaacggcctctccttcgggactctgcgactccaattctcgctttttgttgataaatgcggtcctccgagcagtggagtacatgtctgtcaattcaaccagagactcgactgtcggagaatatacgacaacaggggcagaccctgcaaggagcgggaccatcgtcttaaggacgcttgctggctctagcaaggtggagacgatcagaccgtcaaagttaccggctcggccctcgtccaccactgctttaactcgcccccatcggttgcgcttgtggtaatacgcagtgcgcttgctttgtttaagctccgccaattcctctgcaggtatgatgggtggttcgttggcgtagagcggatcggaattggggtcagccaactgcatccaggaaattgatttgaggtgggtgtggagtgggtgggattcgtcagggttgttggtgtcatagccaaagaatttcaagagtgacaagttcggttgtgagtatgggtggataacggtaatggtgttggtagtagcggacattggctggggacgtatgcgccggggctttgggggttcatcggtatgttgagattctgcagcattgtgggctggaggatcttgctcctcggttgggtcttcgtcggcatcgtgaggatatagaattcccatgcgctcagccatcgcggcaacgacaagtccgccagtctcatcgacgatagcataacgtccatgcggcttcatcccctcacccacctcaacgtttccgctgtgatgtacattaccccagcacccgatgagaccgatgtgttcgtcccgtagctccattgccttttgcgcatcccgttcttcgatcagataattagcgagaaggccgacgtccagtgggaggacggtaaaccgcttcagatacttcttgcgtttccgcagcgtgtatttggcaagagagaatgcggtcttctggtctattgcgctgtgcgattccaagagctttgcgacaatgtctttccccgcgccaccggcctctcgcttcaattcttcaatttcctgtagagtcaatttttgggaagagttttcgtcattgatttgacgatttgttcgcatcggtattccattttcgccagtatccacgtcgtccccctccccatctccctctccgtccgcgaggagggtctccgcatgcaactcggttgctgacacgacacgtagttggtggccagcatcatcgcacgcatcgagaatttcaaaggtgaaatagaatgggcgtccaataatctgattggcggtaaagttaccaaatcgacccaaattgacgactctggtccaatgttagttcttgcgatggaatctttccccgcatagtgcagaaagtacttacgtatcggggataatctggatgagtcttaactgatccgactggagccggatagccacaaactggcccgggcgaatataggaatgcatgatggcgatggaacagctgtgcctcgagctcttccacaaaattgttctggggacttttatggccgatagaatgacagccaatcagaggacgagaatactccagccgggtggatagatagtccgggacattcatgcctgaaacgtatgcctgatatttatgccttaattactggcttcataccaatttcgtcattaatttccaacataccggcccataccgtactagcaccgccactccacccgttgcccctcttgcatgtgaataatacggtaaatacgcatactggcgtagcttccccaaagtcaaccagcgatcgctggtggatctgcggaatcccggtgccttgcgagaagagagacctctgagatcatcatccacctccgtcattgccttgttcaacatagctttctcttcatttagggcatggtatttccgagcacacgctaaaggctaggctgttgcccatcactcgcgtatctgcgtagacgggcacttcagcccctgccgtcccagcgcaaggcgtttttcctatactaatggcttattgttattattctgagcttacgtcctgaatcaactctcaaatcgaactacagactctttctgagtgtgttctgagtgtgtgtcgatcgacgttgagtgctttattagccttcccgttcctagaactatacgcgaactcaacccttccctctccgcttcccacaaggtcaacggaggtcttcatgggcctgcgaaaacagcccccaccgcgtctggagaacattagcaagtcaaatgttcgatcggacgcacgctcatccaagtcacccaactctgcttccttccatcgcccgattcgtttaaaccgatttccttctggggaccctatctactctcccgacctcaatacttcacctgcgtttgacctgatgccacttgaggaagcacagcggtcgcctgtggggtctcccaccagccaacccccgagctcatggccagacaataacagaagaccggaagacggccgctccggtcagtataatcagtatgagggagcatacaacgaacctgcaaataccaacggacactgggttcccccgacattgacggcaggtcaacaactaggagcggccgagaatgtgtggcggtcaacgactgatggcggtcgtgcttcgactggagagctaccggtacagctgcagtcgaataacccattcttgaagcctaggccggcagagcatactcaagatctcttggatcgcaatgagtggggacgtgattcacatgcgacttcaaacagtgacgcattgagccaatgtatggcattagttccttctgaaagttccctcagaatgatatttgttgctaacgacttgtagccgaagggtatattccgatgactgcgcggctctctcttttagatgagcccgaacaagaatccccatggaccgaggctcctcgtcctcaatccaattcccagcaacgccctgtattaggcggtcaccacctcgatgataactcaccgtgggactctcaacagtccgccaaggttccggttccccagggtgtctacctacaaggagagcagtctaatccatatgccccagcggttgcggtgcagccgtctggcctttctgattgggaaacctatgccggccaacaatataagcctccatccaattcagggagacttggatcggatgctggaatcaatactccatctgttgctctttctaatcgaacctctgctacctctcatgaactaattgattttggtgaattgagcgccactgggaattcggtgggcgagaccaggtctcctgctgcatctacggcgtactcagaacctgccgcgaacggagcaagatcattatcagaaaagcaagacctcgcagctcccgtgatacaacaactacaacaaccccaagcaagccctatactgtctcccgcagaagctgcacgacaaaaagagcaaagatcagaaacatatactattcgacacatccgatggaccgatcagagtggtcaactgctggagtccccgattttggtccaaaatcaaaacggaccttgtcctctgctagcccttataaatgcattagtgctacgagcgaaccctaacgctcacccaccaatcgttagagctctgtcaactcgcgagcaaatctctctaggtttgctaattgaggcgatgtttgaagagctgacaacatgcctgggccctgatgaggagttcccagacatcgaggccctcactcaattcctgacaatgctgcacacgggtatgaatgtcaatccacgtttgacaatggtgagtacatgcgatgtatctgtcaaatatcacttatactaacctaatgtcagaattctactgaaggatttggcactttcctcgaaaccagcgacctcggactgtatagcacgtttggtataccattgatccatggctggctagcctcatggtccagtcctacccatgctgcgatgtcacgcactgcccagtattacgaggatattcaaatgcttcccttccgcagacacgagtttgaggaacgggtggcgcggggcgaggcacttgaacctgcggaagagaatatcatggcggatatccaaaccatccagcgatttgtggaaattgagaatgcgacacaattgagcccatttggcctgacacagctctcaactaagcttacgcccggttctgtctccattcttttccgcaacgaccatttctcgacattgtataaacacccgcaatcccaccaactctacactttggttaccgatgctggctatgcgggccatgccgaggtggtttgggaatctctagtcgatgtgacaggattcaacacagaatattactcaggcgattttcgacctgtaggcgctggtccttcagctccatctggccctgatcccgcggtcctccaagcctctaatgagccagccactcattctccagaggcaaacgaaggatcgaaatcccctgagctgactcaagaacagagtgatgccgactatgcatacgcgctgtcacttcagttccaagaagaagagcgacgcgaaaatgctaggaatgagcaggctcgtgatcgtcgcacatctgcgccgagtaattcttccaatcggccattgccttcgcctcgcttgagcaatgtgcctaatcgaccattgccctcgcctcgtttgagcaatgtacccaatcgatcttcgagcattgccaatacgattggttctcggcctagtcctcagccacaacatggacccgaccctgaggacccaaatgcaccccctcctccatatgaacaagctgctgctagcgggccgcgttgttcgcctcctgacataaggccatatggccgtgccgcaggaaatcagtaccctggtaaccggaatccgcggaatcgaacctcgcagtcttctcaccgaccacgcccgcctgtacgtgcaggggatcataatatagaaacagaacggaacaaagaatgcatagtgatgtgaccaatgtaagatctggaaatgataagaggcgttgatacttgctttacgccaatgcactggatggatgaatatgatgcctacaaatgatatatactattgtagagaaagaacatgtctttgattgattcgattccagatgaaaccttaatttcttgctcctcgttatcctcattctccacggcgttatggaaattaacaaggaccttctccgtgcctctaacaggagcggggctaataagcatatatcaacaaagtgacatgtgagatagctacgtatgttcggacttgtcacggactacacctatgcccggaggttaagtaaattaaaggactcacgtgaggaagaggtttctcattggaggagtcattatccagatagccctagatcttcccccgggaaagactaaaaaagtgtgtataagctatgtattgcgatatatgccgaccatattgccctatagcctaagtcaaaggcgatttgggacgctcttatatcctgaatgatacaaccccggtccaccggcccgttgactaggatcagggcatacgtagtataaagaatgctgctatgataaaattggcctataatcatccttcacggtgctgatttccttgcgagccatcaggatctgtatatttcctctgacagtagctcttgcgatgcagattcttctttctagtgctctagccctcgttgggatggcccaggccactactgtttgcagtggaacatttagcacaatctcagctgccgagtttgtgtctaacctgcatcccggttggaatctgggaaataatcttgatgctgtccccgatgagggatcttggaataatatgccagttgtggcgtcgacagttgatactataaaggatgccggctttaggagtgtccgactgccagttacctgggcatatcatttcaccggaggctcacctaattggactgttgacccagcatggttacagcgagtctctgatgtggttgatatgattgtggctcgtggaatctacgctatcgttgatgtgcatcatggtatgatatatgatcttgtatcggagaagggcctttactgatataaaacagattcatgggtttgggctgatgctacccagtctggaaccaatcttactatgattgaagaaaaattctatagtctctggtatcaaattggaacgaagttggcctgaaaatccaacctagttgcctttgagcctatcaatgagcctccttgcaatactgcggtcgacgttaccgagtcgaacaaactgaacaacatctttctccaggctatcaatgatgctggtgggttcaactcgcaaagaattgttaatctagtcggaggtggtgaggatagcgtcaagactgcagactggtttgtagcaccctctggattttggaatccatatgctattcagttccactactacagtccctgtgggccatagatcagtttatacttcaggtataatgcgttgtgggttgaactggccgagtgggcttctagacgacttgatattcagcgcttggtaagagtatagacccagttttttttttttttttttttttttttttttttttttttttttttttttttttaaaagtttactgatttcaaacaggggaaagatcatttggggctcggggctctgacagtgacaagactactgtgcagtctgacttccagctgctgcgcaacgctttccctgatgtacctctccttttgggtgaatacgatgcttcacccaccaacaccgaacccgctgcccgatataagtaccttgacttcttgatcaagactgcagccagtctcgatatctcctgcgtgttgtggaataacggattggaccacttggatcgaaccgcaggagtctggcgtgactgtaactcactctcgatcatcacaaaatcaaccgagtctactgccaatagtttaccagatagtaccgaggacgcttctgcaaccacacattcataatcagcttatattttccatcagtatggaacagttgtgacagcacaaactcttccatttatcttcaacggtaacaccctctcgtcaatcagtgactccacttgctcggcattgtcgttgggaacagactattctgtttcgggtgcaaatataatattcacagcttcgtacttatccaagcatctttcatctacgacaacaccgggtattattgccactctaacgctgagattctcggggggcgattcgtcccctgctgtccaaattgttcaatggaaagccccaactctgtcgtccacatcggcggtggcttcgactgtctctggctctgccctatcaattccaatcacatggggcggactatcaaccgtcgctgcattaaaggccttgaccaagagtggaacatacctggtcgatgactggacggtatcactgagccctatccagcaagcgagagttgtaagccaagccctatttctctttgtgtaccatttactaatactactaatatatcgatctagacctacagcaaccagtataactgggatgactccaatgtaatcctcacttcatctgctattagctgtcatctctgctggccaatcgaccgtgttcaccttcgagtttttcccacgggataatggtgctgtgaatgccgtcaactttaccttgactgtttgataggatttatacctcgatcatgatagttgtactgaagaaatagttcaattatattataagtattatcaggctttgcttagcagcctaggtatcgaatatcagcatttatgtacaaaaaaaaggtaaaccatcgctgtcatcaagtcattaaattccatggcagatagctaaaatcaatacaagatttttaattcccgtaaaggaagatgagggtcatatttgtcccaaacgatcttgttcttctcattcaggtgtgcgccctcatccgtgatgctgattactggatctgtctccagaacctcatggttactgaaaccccacttatcgcgtgggatccacagagttggtggtggcgatgctacacatggctcgaaatatgctgtacgcatctcttcgggtgtgtaggaaaccccctcaacattgcggcgaatcttttgacgcaatgccgcataatctttgtatacgtttggatggaaccatttccagaaggccatagcgcgtgggcggcgctcttcgttgatcgctgccacttcgtcttctttctcttggagcatttcctcttctgcgtcaagggatcgtggtaagaaactattcagcggggcgagtgcatcgttgagcgacatgtgtgccagtatgttgccgaccatgaatagagccatgattatgactgggccaatagcgcccttaatagcgcagagtccaatcaagcaaatctcagccaggtagagacctgttaacaaatgttgcagggctcgtgggtagactagtcccttggtgtcgacttggatgtcatatacgaagaggaagttgtatcggtaggcttggtatacaagataaagcccgaggaaagcaaatcccagaatcagaggtgcgatgcatgaataggtcaatgctaaaaagtcgagtcagttcatcttcgttaaagaatgagtcctggtatagggtattacttaccaattacagccatgttggtgaagatggggaagacattgccccagctgatgctagcaagttcgacccatccttgaaacagacgacgtggggagtaggcaaagaatgtggtgacaaatttgaacaccaaggcgctgacaatttgaacaagggccagggaactcatgctcaatccttgcagcatgaagtaagaaatgtagaaattggtcgccttgggtaagttctgcgccagcagatccttgaccgagagaggatccttgacaatctgtgcggtagctgccgacgcagccgatgtcaaggtcgtgaccaagaacacttgaaccacttgaaatacaaagtgagcgctttgtgtgaacagctcaactcgtgcccttgatgggactccggctcgtctagcgcatactaggtagaagtcagcaggaattcaagcaacaaagagaatccggagagcgtactacgacaaatgatcggcactagtgacatcaacgccgctagtgatgcggcaggcagaagaccctcaattgctccttttatgaaatcaggcaagtcaagaatgaagctgaggaagggaatgatcctgcagatgtatgtgatgttcgaaattgcaccgacgattgccgcaggaaatgaccaaaagatgaccatcgctgccaggaatccctggactgcgaatctcctcacgattctttgccaccagctcagattcagtgccgaccatacaacctcgcgaggtgagattccaataaagcgaggcgtcatgtgaaatggttggtgatgcgacagggtttgtagcgcgacttgtgcatcggcctggctgttgaattcgacaaagattgcactgagctgttttgcttcaccattttggtgttttgcttgcaggtttgctacttcttcggttttctttgccagctgagcccgataccagtgaatagagtcgaccttttcaccaaagaacttcggtcgatgcatcggacgtttgaccttgtgagaccatgccgggttgcttgactcgcagtccaggcacatgtcaatattcaattcgcctgttttgattgcttgggttcggattttattcgctcgccgaatgagcttggtctctgcggtttccaacttctcggctagtcgatctcgttcactaaccatcttcttcaattttgtgcagtcggaggtgatccaggttcggcggatggagtcaccaaatacttgtcgtagtttattttggttcttgtaagcgtccggaactgacatgaagaggactgtacgggacgacattcgagatgcgtaggcaggcgagttgaggtaggcctggcggaggtttgcataatacagactttctctaaccacgacataaaacacgaaggctatatattcttgtcagtccagctgtgttgcgagtgaagatacggacaactgactgaagtaaacacatgccactatagcattggcatagtatctgctggggttcttgacgttactgaaactcaagatgtcgagctcggtattgccgttacccccagtagcatgcagaggcagcagaatcggccatgtaatcacacaacctgtcagacatgtcgcagccaagacgcgcaaaaatcgcaagaaaagataaccgtctagcgatgagtggtggagcacatgattatcttcaatttttaaaaatgtcccgagccagttaacccagccagaaggcaactcgggactccgttgatgctcgtgtatatctggtaagtaggatctcggagcgtaccagcgacgctgagttcgacgaaagatcagaaataggctgacccaaaatatagcgtatacaagtgcaggcaatagagtcatcatcagggccgagcccgatgagcccccttcgccggtgagactgctggcgatatcaccggaggtggtggacgcgttgcctcgcgacgatccaatatttgtgtcattatcctggatcacattagcacggatttcagtatatggggtttagatgggaggcataccgttatacttgacatggtgagtatcgtctccgagttgagaaacaaagagatgtacaagccaaggaaataatgacaggaaagagggggctatatggagttcgaagtaaattccccgtcaaaaagaagcaaagagaaaaagcaatgctctttgcatggtccccgcttgcgacctgtcatccacagcgatccacaatggatatagacaaatgggtgagattcgtgaaattcgtgcatgtacgagctgataggtcagccctgaagatttgatcccaaagccgaggtgtcgtcgatccgatagtgtgtgggtcttttttgccttggcgaagatgtgaagtatgtgctctatgtatgtgtcagatggaatttcaggaaatatcaaactcgtgagagatctagcatttacatacctttcgtttgtgcagaagaaaaaaaaaaaaacaaaagacggaaaagtaacgagagagaggaacgaaacccagccgatgcgggtcttccaatcaaaaactattcggccgatccccgctgatcgagaaaaaacccctgaatgagatgagaactttgaagatttggagttcatgcaggttgtggaccaatagacctattgatcttatgaagcgtagtatatggaccattctaccctcccaagacttcgcttggagagacttttcggctcccctcttgttcccctcaatgggcttgagcaatgcaaggggcccttctggcggtggaggctggacgcatgggattacagcacatggggaatgttgagtctggatccctgtgaagtgtcaaaagatgcatcatgcagagaaaccggtatactcacgtggggtggttcgagattatcggctacggatctcactggaaatggcttctagatagatggtatggtagacagtcgaaagaggcttcgatatacgtattacttgtatcacttagatcaaggtgatgtacctagaccgtacttcgtatatgtacctcgactgcagactgtagtacaacacagaggagaaacgtgcaggtcttggcatatgcacatagggatcactcaacattctcagtcctttccagtcttcctttttcagagcccttacttgatctaaaatctatagccaaccttgaaaaggttacactacattcggggtccatctaagcctggacacaaaatatatatccaaatatccggatggtcaagcgggaacatatatggagatgcatcatgcgcaagttccgatgggggagatgggtgacgcatgggatgttgccaatgtgacgctttcctggttagtgacgagacgtaatatatcactaggaactcatcgtggacgagggcatgattcgaaatattggaaatagaaccttcccgataaattgcgcagagatgttgaagaatcggaacgattatatgtctatatacaacatcttcaaactaaaacttcagctcttaggttcacgattctccttggagacaggcaggaatttggtgtgtgaacccttcgaaaccaacgggcccacttcatcgtcgacgactcgagatattttgacggtcgtgaaggccattgacttccccacccgatcagcaacggcagaaatatccagagtatctccaacggtagccgttgacaggtatgaaacgtggatatcaatgcttgcgcctgttctctcatatccatgtgtggctatcgccatgcccccggcccaatcgatgatggtcgcagagacagccccgtgaatggtgcccctggaattgacatgttccgctgtgagtttaagtcgagcctgcacctggccgcggatggcactgatgatatcgacatcggatagaagaagacggtagataggactgtcatttttggtccgcttccaaatcccgcgcacatgctctaattcggtgccattcatcgtgggtgagtacggaaatcaagttgggaggatgaggatatggtcaagaacacagggctgacgaatgtgtagactttttgaagtcggaagtcagagtcggaggggccgagagcggaatgggccgcctttgcacggaacataccgaccatgttcttctggaaatagggagagttcttgtcactgaagtctgccctggatacattgataaactatccgagaccaacattggcaccctagtctcggtgctggcttgaaccgagctttatgacgaactggagatcttgcacgcccaaactacacttgaaagtgggaatactgacgagtgcatcgacgaagacaagatattgacaaaagaatcctgaagagatccaggctctaacgcatggcgttgatgtcaagctacgttatatggaggaagtgtggcacctagctgcaaatgtttaggtagtattggagatctcgtggtgccttctccgggatcaagcatcgacttcatctttctgatgattcacattcttcaagtaacgtctgtcataaatcttggcggtgtgtagcctacaacataccgtcgtggagtgtggcatccctgggagaccgacatagggcggtgaatctggtgatgattgcagaaaaaggggagataccaacaacacaaactcgtcgtcatttcgcaaatggagaagtcaacaaggacgttcaattcgtctttagaggccaaacagcccttcccgcctctgttggctgaagaccatatatccccagaagaatcgcaagagagttatgaagacgagagtatcacctcccccggctatgaggagattgaggtggatgacgatgcagatttccagtcgcactactcgttagatcaatcgttctccgatacagactccgatgaatcttccaatattgagcgaaaccacccatttcgccagtcctccggctctctctatggccccaatgcatttgcgcctccattctacaatcgtccacccacccctctaccgccctcaccatccctcacttctcttcttcggccgcccttctcgactactacatcacgcccaactactccggacagttcagatgtcgagactcccaacgataccgaggcggcagtcgccaagtcagctcgtcgcgcaaccaccgttccgcgcgccagccccaaggtccccacctatgaatactatggcttcgtattatacctagcttcgtccttggccttttgtaagtctgacgaaaacttgccggggcagttcctcgtagtctcctgcacactaaccgggtcaacttagtgttttatctcctatggtcttatctcccatcaccgttcctccaccagctaggcatctactattatcccaaccgttggtggtcgctggcgatccctgcatggttggtgatgttacttatctacatttatgctgcgcttgccacgtataatacaggctaccttactttgcccatgcacagcatcgagaacattgttgatgaggtcgcgaatgtatcggtgattgacggaaaggcacggagacgtcccggtggtgctaccaagatgaagcctggtgctacctcctatcagatcatgggcccccaaaatcgcaaggtcaattggcgagaaatttggagtgagggaactgacgccgtcatggacgtgccggtagggggcgtgtgtgaggttttgtatggccaggatcgagaagaagactttgactatccggctgcagactcatagcttctcggttcaatcaattcccttgccaattcaggctgataactgcaaaatactccgtattgatttcagtgttcctgtctacttcgatccacctgggaaatgacgtcgagttagaaatcaaatagcacgtgactagcagtgtctggcccccttccgccctccgcctaactgcccatatctccaaagccgactgttgagagaataatttcacaatgtcagcagaacggccctcaacaccaccttcgcagcccaagggctgggaagcaggacagcttccccgcgctcctatcactccagaacaacaacggaggatggtaggttccctccaagcttgcgccatggtcagcccgaactaatcagtcttactgataggaaatcagtcgcatgaaagctaaagcccttcgggagaaacgtgaagccgaactatctcaagccggtccaaatgactccaagtcggtgacaggcatcaagcgctcgttcacctcgatggcggcatccagccaacctgctaatatgcgcgatgcatcttcttcgaatcgcccactagactcgattaagccagcccgaaatttcacaagctacgtcgactatgattttagcaagatgaccgacacaaagggtgggtttttgacacaggaggatgacccgttcaataaacaactgcacgtgcccgatgggaaagaacaaaagccagcacatatgacgcagaaagaatgggaacgcgatcagatactccagtcactgaagcgaaatcgggagggaccctttgaaccaggtctcagtgtcctagatgataaaagcaagcagaagacatgtcgtgaatgtggcagtatcgaaattgattggaaatgggaagaggaacttaaatgctgcatctgccatacttgcaaggagaagcacccagagaaatacagtttgttgaccaagacggaagccaaagaagattatctcttgacagatcgtgagtgcctaatcacctatgaaaagagagatgtgctaatcagcccgcgcacagctgaactccgagacgaagagcttcttccacgcctcgagcgtccgaatccacacaaatctacatggaacagcatgatgttgtatctacgataccaggtcgaagaatatgcgttttccgacaagaaatggggctcaacggaggcgctggatgccgagtttgaacggcgagaaaatgataagaaacggcgacgggaggctaaattcaaaacgaagctgcaggagctgaagaaacgcacacgtgtggaggcctaccggcgcaatcgacaaggtgcttcaggcggagagtttggcgatgatctcggttctggacggaagcatgttcatcaatggggccgatccatcgagaatccagaaactggaattggggtcaagacgtgtgtagaatgtgggatggaggtggaagagctcgagttttagacgaccaaaataccatagcatgattgattattgtatgagaccacgatttaatttagcgcttgaacctatttgtgacttccattattcttgtgctgttgaagtataaaatgtcacatatacaccacagcagtcaaaatatatagttcccgaattagcaatcaaactcgacaccagcgatcctatcctaggtcaatctttcatacccatcaaacaatagcaacattcgaatctgcggtgcatctatgctgtggagtatatacttgcgccttgtataactagttaactaactagttaactaatgggtcatatagttggcgcctggaaatcaaggcatcaaccatcctctcaacctcgctagtcggcctgtcatgatccctgcggaacttgtcgaattggcgatcaaataagaaactacttttatattcacctttaatacaaagaccctcccaattcatccaattgcttactccagggctggaggtaacgtgcaggtcaaccttctccatctagaaggcggtcagcaccccccgaggccatcttcaccataacaaaagatcagtgaaggcacattctcatcctcataactttcctatcattgctcaaccttgctcctctcctttggatattcctcctcaggacgcctcatccacaggctgactcggcgtggaacgtggttccttgccgtcgccatcaagggacttggttcgcttattgcggatacgatttactggggtcaggagaaatcgaagctcgcacctcacacgtcacttgatttactatcggcctgattttcccatcggtacctcctgcagtgctttgacccttccgagactcgacccgtcctgtgtttgttcatgtcctggcaatctccatcagctatggctgggattggaggaatgcccggcgccatggatggttcgaatggcccacaagggacggaatacacattacagggtgagcatgaaccgactcgatttcttgaatgccattgactaatattcatctctaggtgtaatgcgcttcctacagacagaatggcaccgacacgagcgtgaccgcaatgcgtgggagattgaacgggcggagatgaagtctcgcattggtcgattggaaggtgatctgcgcacaagcaagcgcttgcatgaggcccttgggaagcatgttcgtatgatggagaccgccctgaagagggagagggagaaggtcaagaagctttcgaataacgaaaagtatgaagacgctaaggatcccaaagatgctgcacgtgaaagtgtcaacttcctgaaaggtatgtgcctcgcaattgtatgctagcacgctcggtgagatttactaactgagttattcaccagcgcatcgccccaagccgagcacggaccccaataatgacgaagagcgcgacagcgaaaatcagcatgagtgtcaaatcgaggacatagacaaagtccggggatatctgtccaaagcttcccacgaaatcgcgtaccatgttatacccgcctctcacccgccacctgacctgaacgactccgatatgtcaggccagctctatggcaattcccaactgtcgcaacagaacctggaagaggcttatcttcagcagcaacgtcagaaggcaaatcacgttatggcacgtgaaatggccttacagaaccaccaaccaatgtctaatcactactccgacaatgccatggctcgtgctcaaaaccagtatcttcctcgagatgccatggatcgacggtcaatggacccgcagcaagcccccggcacagcaattgaaagtcgaacccaagtatacgaacagggtatagtacacgatcgcccaaaccaggcacacgagacccagggccctcgagtgatcgtcaaggaggatgtgaatttggaaaacttgaccgaggaaagaacagaggatgtggatgggtggaattttgacgaaccggcggagcaagaactcgtggccaccgaaaccgtcccgcctcatcgcccggataccgatgctttcccaaatgccaactttacgtactctgagtcgaccaaggacgggtctttccctcaccggacgaagagcacggaatcaagtcgtaagagcgatggtgcaattgatgcccgggaagcgggtacgacgttcaaacaaaagcaagattccaacttcgaagtccggtttgtgctgcgcggccacttagatgtgattcgatctgtcatcttcactggtggtggtagctcggacgagcccgaaatctgcacttgcagcgacgatggaacgatcaaacgatggatcatcccaggtacttctggtggctctggagccggttctagccatagctcggacattacgagtgactttactcaccgaggacatgaaggcgctgtgacttctcttgccgcctgctcaccgtcccagaacaccttcaatggtggctctgtgttgggtgatgggttggtgttttcaggtggccaagatgccagtgtgcgtttatgggagcgtgggcggattgatcccaaggccaccttccacgagcacaaagatgcagtctggggactctgtgtccttcccgggaccatgggctctgtttttggcgactcaagtagccaatatggtggatcggatcgcatccttctagcctccggcgcagcagatggctacgtcttgatttgggctatcggcgcctcaccctcggctgcaaaccgccgtcaaggcagaagggagcggtcgaactcaaattcaatgccctccggttccaacttcccaactttgcctcagcccagtgttgctgcacccccagctttccattacactattgttcatcgcatcacccgccctaattctccttcccccacatgcattagccccttgtctcttgcaggcgtcaattttgtcgtctcttactcgaatgcctctatcattgtctacgacacgcggaccggcgaagaaattgcgggtatggccagtctcgagacatacgatggcacgccagctactggggtgaactcagtcgtcgccacgactgtcggctttgatggaacagttaatctcgatcccaaccgcgcgatggccgaagaagaagaagttgtacacggagctactggatcaagcagcgtagagggtgtaatcatcagtggttacgaggaccgatacatccgcttctttgatgccaatagtggtaagtggcatccaaagtgccttgatatttcccgcaatacgctaatattcgatacaggtcaatgtacatacacaatgcttgctcaccctgctgcgatagcctcactgtcattatctccggatggacgtgagctcgtttcggctggtcacgatgcaagcttgcgattctggaacctcgagaagcgaagctgtactcaagagttgacaggctaccggctgatgcgtggcgaaggagtctgttctgtagtatggagccgtgatggccgctgggtcgttggcggtggtggagacggcttggtcaaggtctgctctcgatgattgaaacgacggaatgaaaacccgtgtatgattcttcttgcgttatacctgtgtgtgtatctcttcgcgtttgctcgtcgttttctgtatgatcccatgaactggatgagcgattggccggtccagttatttcgagcatttgcaacggtgtttactgacgttgtgtggcctcccatactctcctacttgattttgctttttttttctcctttcttttttcaacatgtgtactttttacttcgctgataacatgttcgacaaagattccctggcgtgcgtggatgttttcttcccttcaactgttttggtacatgctctattctctatgggagctagatcccatcttgttcggatactgttccatttgctcttgtgatagggtcttgattgggtttgaaggagtgcctgataggccttgaaattatcccaatacttgacgtgtcggttgtttggtgtggatggctttttttccccagttctgcttgaacgtgcctatgtagtttgtgcctcggaaaccgatagctcatgttgtgtgtataacatttgaatccataccattcatcgagcaaactcagccttgttactctgtagactatcattgacacaagacatgtgaaacgacgggaacaaatacaggtattatacgatattgacattatttcgctgcgctgccatgaagatataatctatttggatgagctccacgcctccttgaacaccaatctcaaccgttttgcttcttcctcgtccttcaatcgctgctcgagatagccttgcaggtcatcccagaaagcctctgtatgcaacacctcctcaccactcggacctatagcagccttgggcggtgattcatcccgcttctctgtaatctctggttgagccatagcagattcaaccacctgcgcgccaccgatgatcatcaccccgatctcaacctctttgcctcccgccataatcgcaggttcatctgccaatacctcggccaatgtcttcccggtaccggtcactggcttacgcttgtataagattttgatcttgtctagcggaacttggcctccctgagcatcggtgacgcgcacctgcacagcatcccggatatcctggaccgaggtggtcgagagaggggcgttggagatcaggaattccagagcagggttgcgggcagacttgacgcggacagtgattgatttggatgagcctggtgcctgtactgacctcacctttttgggcattggaggatgcgcggctgaaaggcgggggagagtgtactatcgttttcacagagcatattagaatgatcttcctcaatgagtaaagctagagaatgttcgcatcaagactcacgggcactcgtagtccaatttgctctggatcgaagacataatcagcgcgaagcctgataggtcgcgagtctagcgtggacagaaatgatttggtaaaggtcagctccgacatggtgagaaatttggtagaaattctcaaggcagaaaaagagagagagagaaagcaaatccgagctgatagctgttggagtacggagtagtggaggtctggacctgggggtttcacttgatgccggtgggacaatagacacctggattataaggcatagttgtaaataagcacaccgcctttcattgcttctgtactgctggcagtcaccgcccgaagaaaaaaaaaaaaagacggaaagaaattacaagctccccagaaagcaaacactattaacgtccccatacacacccctttttcacaatgggtgtcggtcgccgtatgaagaagcagggccctccgggcccgctcgacgagtcaaaagtcacaatgctcaaaaaacgcaaggctagttcggctgaagcgcctccgaagcctgtaccagcgaagcgtcgcagatctaatgccgatgagactgtctcgaagaaggaagcctcgaagaagaaaaaggtcaatggtgctgctcccaaggttgattcaaaggaacagaagaagcagccgtcggtcacgaagaaggctgtgccggtgcctatgtctgatgatgatgatgatgatgatgaggatatggatgatgatgagttcggtgatctcgatgagatcagtgacggctcaattgatagcgacgatcaggctgaaggactgtccgatctagaggatgataactcagttgtcgactctgacgaggaaggccacacccgtggtgccatgttctccgacgacgaggactccgatgctgaagagagattgaccgctgcaaacatcgagggtctgtcgcggaagttggatgctgaacaacaagaggaggaggaagctgctgagcaggaaatgcaggaagccgccctgcagactaacatcgctgcacccgatgtgttcgccgaccaaacccagcagggacttgcccccgacctgcagctgcttcgccagcgcatcacagacacgatccgaattctgggtgatctgaagaccctcggcttgcccggtaggtcgcgtaccgattatatagatctcctactcgacgatatctgcacatactacggctacactcgattcctggcagagaagctgttcaacctgttcactcccagggaggcctttgccttctttgaggctaacgagactcctcgccctgtggttatccgtaccaacactctgcgcaccaatcgccgatccctcgcccaggccctcatcaatcgtggtgttgtcctcgagcccgttggcaaatggtccaaggttggcttgcaggttttcgagtctccggtccccctgggtgctacccccgagtacctggccggtcactatattctccaggctgcctcttctttccttcccgtcatggctctcgccccccagcctaatgagcgtgtcctcgatatggcctctgcccccggtggtaagacaacctacatgtccgccctgatgcgcaacactggctgcattgtcgcaaatgatgccagcaagccccgtgctaagggtttgattggtaacattcaccgtcttggctgcaagaacaccattgtgacgaacatggatgcccgcactgctttccccaaggccatgggtggcttcgatcgtgttttgctcgatgctccctgcacaggtaccggcgttatctcaaaggatcctagtgtcaagacgtccaagaacgagcgtgatttcctcgccattccccacatgcagcgccagcttcttttggctgcaattgattccgtcgaccacgcttccaagaccggtggatacattgtctactctacttgcagtgtgacggtcgaagagaacgaggccgttgtgcagtacgttcttcgcaagcgtcctaatgtcaagatcgtggacaccggtctcggtggcttcggtagccctggattcctgagttacatgggcaagactttcgatcctaagatggcgctcacccgtcgttacttccctcaccgcgagaatgttgacggtttctatgtctgcaagctcaagaagactgccgtgactcccgtggccaagtcggacgacaccgaaccccgttctaagggccccaagaagacccgtagtacttcctcgaatgcctccacggacgacgagtccattgaccggaccccgatcgttgatgagaacggacacgccgctgatttcgagggtggtgccttcagctccttcgaggatcccgaggacgtcgagcgcattgctcgcgctgagcgcaaccgtctgcgtcgcaagggtctcaatcctaagggtgttctgaacaagcccaagaggagcaagccagaggtgtcggagaagacaaccgaaacggtggcacccatccaggaagaagagaccaaggccattgtctcgaagaagaccaccaatgagccgaagggtgagaagaagaccgtggttaaagaagataagaaacccgtcaccaaggctaaggaagagaagaagaccgcagccaagggcaaggtcgagaagaaggataagaagtcgggcaagaaggccagcaaatgatcaatgacttgatcattcgtctctttgtgtataatcttcgtttttcgttcttcaggcaagtcaaaagcatcatgtattaggtccgggatccggcgcattggatataccttttgttcaatcaagatcaaagtgtttcaaaaaaatcaaaaaaatcaggacaaagagtacaaagaaatttaatgtaagattgtgctaaatcaaagatattcaatttatcccaagtcctaggtttaataactgttcttgtctatataaccaaaatgagagtataaaatcaatcgcatcactccccggccaaattaccgttcgctaaaatcaatgaatcgaagtactcgacaatataaaaatagcccgtaccacttctatgcccgataaatcttgatcaccttcttgacctctttgcggcacatcggacataggctcacgaggttcgcacaagccacacaggaacaaaggtgtccacactcggcgaaaactgcatccatttcctcggtgtaacagatttggcacaaatccaactcttcgtcggccacttcccagtagctgatgcccttgccgtggcgtttgccatccttgaagccgccgacatacttgttgcctgtcgtcttctcaacgtaagtaccttgcccatggcatacatcttcgacccaatcaccatcgtacgaatcgccggtggggtaagttagcttgccttggccgtggcgtcggccgaaaacgaagtcgccttcatatatcatgcctgtgttggagatgtgcttgcctctaccgtggtgacaacctttgaggaaatgaccactatagtagtcatttgcgaaggtggcttcgatagtcttagtgccggtgaaaccttggattggatgaccgcgagaataggcccacaggtactgaacaagacggtcaggactggtgaacaatcccgatgaagccagttgagtacgcctttgtttgtgttaggaccaaaagctaatcagatatatgtgtacttacttctccttatttaatttatcccctacgatgaaacataccccgtgcggagctactacatcatcgaagctgtcggcaggtgacaccgtggtgacggcagcaccatcgaatcgtttccaaacgaggaagtcttggcggatagggcgttgtaagtggcgtcggatggatgctttgacgttggcatcaagcctggagaagaatgaccccacggtacgaagcacttgattgtcggcgtcgaatatttgaatgaagtagtatgtatggcccacgggtaacttgacctcagatcgggtctgcgttagacctgccacttctggtgcagaagactgaacttcgggaggtgaaatagtagcggggcttgtggcatctgttaacggagttactgtaacagcagccgtggcttgttgatcacgggcagcgacagtagctaggaccacttcttgatctgctctttcagtagtaaaagagtcgttctctagagacagtgtggctaatggaggcagtgatccatcatcgatgatggagttcacggcacctgacgcagcagaacccccatggggagtattcccagatgagctagccacggcatctccttcggccacaggcgacacattctcagaagcttcgtgtatccagttctcgatgactcggtcattcggcttatcccccgaagagataactgcaggggggtctgggatggcgaagaattgagcgtcctctgttggaaattagccgggtgatggttaggaataaaggtgcatgcaataacgtaccctccgagatgatttccatccaaaatcgtatggtgctcaatgaaggatctagaggagcattcaaatccgtagtgcgatcaaattctagcgagaatccagattgagcaaaggagttaccaatctgccagaaacgaacccgctcgggaccaatgggttcagagcctgaggacttccatatagcaattctttttcgtagttctaccaagcgtgatgagcgtggcaaagtcatgtacatgacactgtttgccgctttggcctgtgccatgagatcgtaggaatcaaacaagctggtcaactggtcatattgaggaagcgcataaacctcaacttgaacatcatccgcagacttgtcaccagtgtggtacactcccgtttcatagtattgtttcaaggtctcagaaacttcccaaggcccttggggaccaggcaaaagttccgataccatatcactgcgaacgtacattgcgatgacaggtacgtcagggcccttcttgtaaatcacagcctgggaaggatcaagaccaagatgtggacccatggctgttttctgagtcaggcactccacgcggttgtcactgccatcgtcaaaagccagccatgtggtacccggaccggctgggcgaaggatgctgaagaacttgcctgaggtccggcggccacgatgaacaacatagccataaatgacatacttgctacactggccatcaatcacccacggagccaggtccagctcctcgtctaactccactttgtcataccgcagctgccaacgtttggtcttgtctagactatggcggccaaactcaacatgaagaaatgatggaagcgaccaacgaccgggcttagcactcaagtatcccctaacggcttcggacgtagacttggcttgatcaattggcatgtaaagacgcgagttgaaaccagtcggcagcatgtttacggtgacttcgccatcagaagacggagcatgtacaaccggactgtcgaagatatgagcgaattgtttgctggcctccgttcccttcagctctagctccaagttgcgacgcaggcgctcccaaaattcggacacatcgctcgaaaattcgtgcagattgcgcaaagtgctagtcacgccgtccgtatcgacatagctccgagggtgtgtctggcggcgaagctgccacatcaacctttgaagggcctcacatagaggcttcggcctagcatcagcattggtaagatgttcaagtacgtcaatattttgaatgatcttgcaaaatggagcaatgtgcaaccacgaggcaagcccggctacctctgggctatgattgatgattgagtcacccagaggtcggtaaccggtcaaggccatgctgtcccaagttggctcggaatcacttggatgccaccagagggacttggtggggtcgtttattacacgaatatacgcgtcaaatgagagagtatcgtcattcagaagggcacgatgttgacctcgccggcgtgaatgaatttggtcccatgggccgtggaaatatgtccacccccaatccaggttatgagtgttgaattgatgacaagaagactgcatccacccggtccgtggctcttgtgggttgtatacaatgacaccgacctgtgcggggacacgccaagggtccgaggttccatgatcagatgggggagtgttcctggccgcaggatattgagacttgtagtcttccaaccacgctgccgcatcgtccgtggctgaagtctttaattgaatctcgggtgtactatcatccagtgaggaatcggctgctcctcgacggaccgtaaattccatcccaggaagcttgccctctggggcgggcatggtggtagagcattcgagatatacactcaatgcattgacattgttcccccgaggatagaacttgattcgccaccaataacccccaataaatgctggtggagagcgaattactttgtcacgattggggtcttccggggtgcctcgaacacccttgaaggtccacgtgagacgggccttttcggtgggaatgtattctggatctcccaaatcacgaaaaaagttggtttcccaatatttgtctgtcaaggggttagcaaatactggatgcttcgtgatcttgcttctaaggttgacacctacgatcactggcactgtaatccgaaccaccgccttcgatctctttcatctcgtcatcgtctgggaccgttgtgtcctcctcatactctgcccaatatgcatgctccagctcttgcgagggcaggattggcgcgggctgaggagctgaacgtgatgacccgggggatcggtttgagtctgtattcggtgttctcaccactctgggtaaggggtccatggccttcaatgagggaatacccaatagttccaatagcttccgacgtgtttcaatgaatatatgagcgcatgtatactcctgtataacgattgataagggcttatcggataagaagaaggttgcggagatgtccacgggtggatagaagggggtccggtagatagggagaggaacgagcgaaaacgaatgaacaagttctagaatagggggggaagaagaagagaaagaaaaaaaaaagtggaaggaagaaaaggaaaaagaaagaagataagaaaaagaaacgaaaaaaaaaaaaaaaagagtccgggggaagttgccgagtggagtctttttgtataagactggattgcctaggctcacggatgaagatttatatgtagatagggtgcatagatatacacctaccgagtagatatagtctaacttcaaccttagacaacttgtctattatacagcgtacctaagtctagcggtgtgccaatccgatccccactcaggggagaatatccttatatgccgagttttggaagattcggtggcgacttggcttatcaaatttccctttcgccactgggccttgcaatccctgggttatctgagccacgccacctcggaaaactattcacttttcaggcacatcaggcatatcagtcatgttgggccgatcaacgtacctgtacttgtacaatgagcgggggccaaccgtaccaattgaaacgatcgcgcgatcaaaagaccctcgattgacaccaaacggaccacttttcgacggtgagtgactattgattggctcttggaaaaagaaccatttctagaccgcgggttcccgcattgcttggcaataagtcttgtcgtactgagactcgacgaggggtaaaagtgaaatcaattttgtgtcgattcagcacgggcaaatgaagcagctacaatcatagggaatactgccgtggcctcagcatagacctacagatgatatggaagtcagcttggcaccaaaagagatagaacaaagagatcaacccaccttgacagacctagcatccgtcttgatcttgccccagctcaccgcttcatccggccgcgcacctgcatcgctgccatcgaactcctgcgcggtatttacatacactgcgtgctcggccccgttgcgcatcaggcatgcattggcgatgtggtgcttgaccaacccaccgcccaagatgatcatgccggcgcgtgtcgctcgaacagccatggtgttgatacggcgcacatcgtctacaatatccacccggagtcgttgtggggaagacttgaaggtgtgaaagtaaagcatatcacccagagatccatccgtcagggccggacagaacacgggaattccattccgggccgcccagtatagaaccgaatcctcgtggtcgatctcacgacccagtcgttcggtaatgcggcttggcgtccagtgaagctcgtcttcctcgtctccagtctcccgagccttgatctttgcagcctcctgttcctccaacatcttgtccaaaataggtaccacccagtcctcgaaagcacagtagttattgttgggtacgaggaggttgccaatgcggttgaggcccttggcacgaaggccagcaccgggagtcgagaacgatccaagatatgtgggggccaagcatttgatcaaatcctcctccacaccccccgcagtggtcacaatggcagagacatggttatgtttcactaaataacgtagggtgtctcgaagaccggaggaaatcaagttcgatgtatagccgaggaagatggtggttttatttcccgtttcgggatcacggaaggcgcgctgagaaacggactatcagactctaatgatttaaaagattcaaagattgcaattaagttcataccatttcattgatgatttgagccgcctcggccaccgcactgccctggaaaccggtatgggccaggctgtccaccatttctgcgacagtgatatcccttccttggaacttatcaaaatctaccccgctcactatgtgagatccctctgggaccggttgcgagctcttgaggacggagtcggtcaccgaagagggaactattgaaggctgctgggcgctcatatttgcgatcggattggaagggacgggaaagaaaataagagaggaattggcgtgaaaggcgttaaatccgcttaaatggggttatcaagatgaggagtcacaacaaaaaaggaagatcagttcggagtagaaggagaggggcaggtgatctttttttttcggcggggaacttgcatcagtctaggcctggatgcctggatgccttggggccttgatgcctcaggcatgtatccataattagtaccattctagaattggagacttcaaccctggagataggttagaatgaataaagaatctcctataatattggcttcatactcttccaagtgtctcatgtctacaaatcttatctctttcgacactatactgctacattcatacatgtatgttgtgctcttagacgcaacattcaatgcaaatagagtttaggaggcacatccccaccacactagcatctaaccgggttagtgccgagccccttgaagtctcacgaactcatattctaaacatattccaaacatattcttcctcgacctgccttcctttaatcctcccacatactccacagagtatacattactctttgattgcataacatccggcgcaaggagctcgcatgatttcgccgatcttgtaacgtgctagtgtttcctgtttcaacgttaaattccttcgctcgacgaatctgtcaatctgtcaagttggacgcttcatttgctcaattctcaagactccaatctagcaatcgtgaaaggaaaaggaacagtacgtgacattggatctttccctcccaacttgaaaaaagacaacgccttacccgatcgggtatccgtgcgcttcaattcttcatatggtccgtgcattcatcgtcacgtgcagaccctcccgagtgtccgttctccatctttgggtatgtgatgcattctgcattcctaccgccttgggctgatttgcactgtacattgaacgcgctggagcgctaaccagtctatagcttcatgatagcatgacgcgataatgtcctcccgatttcccccatcgtccgggttcaatccccgtgaccgttctccgcagcgatttggagaccgtcgcccgccggctggtcctcgtggtcctgacgacgggcctgcaccatttggtagagatccaccccgtggtcctcgggctcttgttgattcccctcgtggtggccattttggtggtcgtggtaggggttatggccgtggtgactttcgtgaccgtgaccgtgacccacgagaccgcgaccgagatcgcgattttcgagataaccgcgatggcccgccgtttcgccgagacatggaccgggactgggttcgccgtgaccgcgatttcgatccccgggacaatcggattggctttggccgaggccgctcaagatcaccgacgcgcgactttcgagacataagggaacccccgggccgcgattttgatctggttcggatacgacgcaactccagggacagcatcatatctgcatcttcgggaggcccagaaggtccccctcctaatattggccatatgcaccggggaggcatgcgagggcgtggtcgcggcgattgggaaggaggccgaggtcgtggtcgtccacccttccttgatgatcgtgatcttttccgtcgccgtagtcgatcccgtgaaccatggcgtggacgtgatcggatggtggatcgcgatagagatcgagatatggaccgggatcgtgcattagaccgtgatcgggtaatggaccgagatcgggaccgagaccttccacgcccgagagagcgagatcgagaattagatcgcgatttggaccgtcgagatcgctttgaccgtcgcgaagattgggacaaccgacgacctgatcgcgaggaccgtgatcgcccagtggacttttggaaacgggaccgtcccccaagccgtgcagatagtcgcgcagccagcggctcaactacatcctcacatgctcctacagcacccggccctggacctggaccaaccctagcagatcgtctgcccgagcatccacaagtggatcatagccggaaatcttcgaccattctcagcactacggctctggaaactacgcgagattctgagggaaatgaccctatcgctgttcgcactagtggtactcgactagatgctgttcgccctgaggctgttcgccctgaggctgttcgccctgaggctgttcgccctgatgttgttcgctctgatgttgttcgccctcacgcttctcggctggatgctgttcgacctgatgctgttcgccctcatcctcggccggctgctcctcgatcggatgctgttcgctctgacggtatgaaaaaccctggaccaatcattcggaattcaccacccccagccgccccccaggtgccggcctttggctcagtgacttccccaatcacgaatgcttcctcaaataaagttttttcagaccaacgcacggcacccaattctactttgcccacagagagagaccgctatgaagtaccgcaaagacaaccggcccaaccccctacagggcccaaggcagaaaggatcgagagcatacagcctcttgaacctcgcagccgccctgaaagaccccgtgagactggcaagcaccaagttgtgccccctcgcctctctaaaccgtctatcaatttccctgatgtatcaccacccaccgctccagctgccatgactcggccagatccgggggcagggcctaacgaaggatttggggccggaaggtcgaactcacttacctcttcccccactttttcacgaattccaccgcctgccccacgcgcattatcccgtgaaccctctatgtcccctcaaatgcaatcgtctggcattccaaccggccctcgagcattgcaatggaaggctccctccccgcgtggccgtaaaggcagcaaacagtgggtgcgaccgggctacggccgaataccctctatttctaatgcactgccgaagcaagagcctgttgaagagagcgaaggtgtttcccctgccaatgaagccacacggcctctattagcacctgagatagacgaccccgagagtggcgagattcttccccatgaacctgcgagagaaccctcgcctgtttccccgccattgaacctcccaccccggcgtagtttatcggctgttgacattcaaacaagtgatgcaaatgaaccttctgagatgagcggcactgataaacccgccttgatcccagactttgaaggttcaagtgatgaggaagatggggagaacattgttttcacccaagaatatcttgatgacaggaagcggatatttgaaaaagatatggagtcactgcgagcagaattgcctccatcacctttggaagattcggccattgtggctcttttgctaaaaatccagctacttggcatggtagccaacgaaaagacagttgaaaacccccccgaaccactcgccgaaccacccaccgaacgagtattagaacaaccagtggatcctgtgccttcagtagaggatgaagagccagtcgaccattcaaccactgagcgagtggtctcttttccctccacactacccgagcgcgaaccagagccaattactgaaactatcatcccccccatggtgccacctgatgaggttactatcgagagtctcccattcttgcactcaggccctccaatacctatttcagatatggatgtataccatgagaacattacgatccaaaatcgtctcagagacacgttcagcacagaactttcgaaggtgcaagcgagaactttcagaaaaaatgcactcctcagggacgagtatgtgtctcactacaagctctggcgaatggctatttgggagctcgatcgtatgaaggagaagaagtccgtgactcctggtccagccttctcaccaatatccacggttccaactaccccggcgcccatgccggaaggccgtgaaggccgtcgttacaaaggaaatagcgagcttgatttcctcaatgctttgaaggcctccgaaatctccgcccaagaagagcttgaacgtcgacgaatcaagatggccactgctcggcccgatctgggccgtgaagcgatcattccgaatatgctcgaaccgcgggaggtaaaggcccgtatctacaaagatgtgaacaacaacattgagtgtaatatggctctggatgttttcggtttcgtgccgcctcctaatgatttcaccccggaggagcatataatctttacggacgccttcatggctcatccaaaacagtggggcaagattgccgaatctttgcccggtcgaaatttccagcagtgtattgtacactattatctcaccaaggaagagattaagtacaaggccaagctcagcaaacgctggaataagcggagcaaggggactcgaaagggtccacgaccgaagtcaaatgccctcaccgcagacatgggtgtggtgaaacctgaccatgtgggtgaggaggagccgcccgctgtcacagacaccggtcgtccacgacgtgcggccgcgcccacctttggcgattccaccgaggtagagagcacgccgattggccgtcggggccagcttggcaaggacggcgaaccagtggatagaccttcgactcggcgtggcggacggggcggaggtactcgcggtgcacggcgcgtgaagagcactactcaaccagatccgaagacccatgtggtaatgccacagggcaatctgcccccgattgtaccgccaacaccacttcatcctggaagcgaaatggatttggcctcggatcacatattggaaggatatgaggcccgcgaacaagagcgttccgaaaaagaatccataccgccaatttctcgaggcagggtgggacgtgggcgagcgaaggaaggagtttatgtcttcgagtctactgaggttgaaccttttctgggaactaaacagcttgagacgggatatggatccttgcaaccaacgagttactggtctgtaccggagcagcgcgatttcccagcgttgctgggacattttggtcgtgatttcgagggtatctcgggttggatgaagaccaagacaacggtgatggtatgtattgggtactgagtcccaatttttgtttttcttctttcccctaatgtcttatgtttgtggctaatgtgcaggacgcaggtgaaaaatttttatcaacgccgcctggactcgggccagaaagactttgagttgattctaacggacgccgaggagaagaaggctcgcggtgaggccacagggccgcttcctgtcccaagtgttgcgccaaagcgacgatacgaggcaactccgtcttctattatccctcgtccacttgcccctcatggggaccctatggccgaggtcgatgaaatacgattccctaaaggcaagcctgttggtctctcaccgcaacccatgtcgctgcatggacgacctctgtccgacaaggaccggaatgtcggtcgctaccagccactggcacaagcttccgctgcttcacctgtgccgtctaccgcaactctaatcgaagagtcgactcgggcaattcgcgcgcaaggaggtccatctcaccgcgttcagggcccacgccttggatatttcacagaggatagacgagactcttcgggattgccccatggcgcgtctcgtgcgcaagaactagcgatttcctcgcgccatcctgactccatgccgacggatatggcaagaatggaacccttgtccacacagggctatattcccgcgcagcagccaacttctcacctttcatcaacccactcacgtcacgccagcttaacacaaacccccggctcgccatccctgcaacttagacccgaactcgacatctcgtctgttcaccgcgatccttttgcccaaagaccttactactcgcttgcaggtcagcccatgggtctaccacagtcgcctcgtcctgggttgtcgccagtgaaggacgtccctcgcccgagtgcgactcccgctcccgacgcaactcgtcaggtgcctgcaaagcggtctaacatcatgagcattctcaacgatgagcccgaagagccccaaccgcgcaaacgatttgccagtgagcaggctccatctgtccctggcgcaacctcaggcataaacccaaggcccatataccaggctagcggaccccctcgccatgaagacaatattatgtcaggcatgtcgcaaaagccttctgtttacgcccagcaaagccaatatcagccgtcatctcgcggctactcagagtactctggctatggtccccctcatggtggctcgggcacatcaaataatgactggatggcacggtttgatccacgggcgcaacagactccgccacagcctcaagctccatcactgccaccacaacagcagcaaagcggccgtcagggttcgtattcatcttacgcggcaaatccaggccaatcctccttgacgaatctttccgcgccatccccagcgccgactccgccgccaataaatgcctctcaacgatcggcttatcccaacgttttctcccaaggctcctctgctcaaccacccatggcctctggctcccgagatatggcctcgcaaccgggttcctatcgacaagggtcacctggcccgcgtcccggtatggtgtatggctcccgacaagatccaccaacgccagcgcagtcttcggctagcctgtatggtatgcatccgcggcagtcagcaacgccaaatccagtacagccacacagttatcaacaacatgtgcaaacaatggtcagtggatcgcatcagccgcaatcccaccgctcaacacctgtcaacttaccaggtgcttcttcgcagtacgggcacaacacccctcctcctcagtcccaggctggccggtcaatggcatcgctggcgagcctcggtcgctcatacacccctccatcggctctacattcctcgatgagcgggggcactatgggcggctatgccccccctcagtcatctgcgcctggatcgataccgccactccaccaacgacctccgggatcgcttggtgaccctgtatccacccaaacacatcaccgtgtctacagccatgggtcggctcaaggcgtactaccgccgccttctcaacctcctcgctagggtcctttgttcgattgatttgaatgaacttcatgtggaaggcaagaccgtgacgggttcggttgtaaattaatttgttgtgtttgtgtttctttctcttgtttagcgtcctggcatctttgccagcgaggatattcatttgattatggtttatatgtataactagatgaatgattttatgtgtcaaaccttgatgtaatgaatttttacaaccttgtaggactaactcaatatctacattagagtgaaaagtatgccctcatcaagacatgttaccggtccatctggttcatatggctgggcaggttccattcatcatagtccaaatgcacaaaggcacggtcgacagtaggcacactctcgatgatatactgcaaactctcaccaacgtcatgactatcccgcaagctgatcttttcatccacaacaaggtcaacttcaacgttcagcttatcactcgcgtagtaggctttcaagtcctgaattttatgaatcacccgggagaaccgcatggtcatatacagcaaaacactatgatcgtcgggagaggcagccgcacccgtcaggcgctggatgtattccgcagcggtctgaccccagttccacatgatgtagaaggagaggaatagaccacccaagggatctaagtaccagagatttgcagcagtaccaactacgatcggtggctgttagttggtactctatgtagggaacaggaataagactgacccagtgggaagatgatgctgaacgtgttaaagacaacgtcagtcatggcatcctgggccaggacctggacgcttgggctaggaatcaatcggcaccagatccagcagaggagcttaaccaaaactgtaccgcccatcagcgagattgatgggatggatagcttaacaaccgtgcggtcgtccccaatcaattgtttgatagaagacagcgctacttgaaaaaaggaagtcaccatgatcaccgagaagatcaacacactgacaggctctaaccggcgtcggctgatgggataccggttgcgatcctgtcggcggatcataatggtggtcacccagacaatcactgtgctaagaaagtccaaaaccccatcaactagacctgcgagcatagacatggagttagtcattgccatgatagcgatctttgaagctaggagagcaacgttggcgacaaaattgaggcgaatggccaggttgatgacgcgctcctcgtcatctagggacattccaccatgcgattcgaggtcagggaatggctccaatgggctgtcttctgcgtcggaagaatgaaccaagggtgtcgtctcatcggggatccgataaagattatgcggggtgcgtttgacccttccgatcttgggattgggttctggtgcctcggtctggttatcctctaacgcagacggctgaagaattctgtttcccgaagaatggtgattgcatccattgtagtcttcgatcaggttatggggtagcgaagaatccagtagtcggtcaatatagagatattgggagatcagtccattgtttcgttcatggtatttccgactattccgggagtcagtgcctagtttactgatgtgaggggcaagccgacatttcctttggaagattctttaatgactcgggtgatttgtagtagcgtttcctgcggcgccggttaggaccgtaattgcatcaagaaggagagagatagtaccactcatatcgaggattactgtgtccaatcaacaacgatccgcgtctgagaataagtcgcctttcaggtgtatcgtcatcgagatcgttcaaggcaaggctcgatgtacgagaagggaaaaggttcaatatgtgttggcctctggtggaaagaatttcacgctccggttctaggcttggacgtcggggacgtagaacgggcgaaggcgatgatggaggggagaaaatcggaagaaatgtttgggaagacatcaattggtccaccacggtgaagaagtgaagctagtaggagctcttttttttgtgcaaggtaggacgcgtaactagttggttagttatggtcacatgacttctgccttggtgattaggtgtcgaggtcaaatataaacatcagcatagtataattgcatcggttgtattcaatggtagaaaatatgacacgatgcacgatgtatatctgtatacaatgtatgttggtcgcatatactccgtactaaggctcaagttggacttgcctaaagtggaatagtggctgaatgcttcggtacgtcgaggccgtacgttcttcttctcttctcctcatcttctcatcttctcatcttctcatcctctttgttctataaggctcggaataggttcagtattccatgaatatttcatggaacctaacagtatcaaccatattgccttcatctcaggtccgatcgacactggacctgacaaatcctactttcacactcactacttaacccaaatcaaccacgcggtcaactgcaatcacctctttgttattggtcccatcccaagtggtgtggatgcagatgcactcgcatacctcttggcataccctatctcacctagccgagtgaccatctttgtgactcaagccgagaatgggatgtggggggcgcatttccgctctttcggagtcaatgtgcgggtagtggaaggccacacgagtcatgatcgagatgcggctttaacaagtgccagcacgtacgatattctacgggtgcgcacaaagaaggaggcgaaggccttttatggccacatgtggcgtgacgggcatgtcacgaatacagagcgcaattggaagcgacgtcgaggaattgcggagtatgagattgtaggagaggagacgatcaatcgttcaatggggtatgacatgggaccagccctaagcaccggcaggcgtctattagcacgagtcagcaaatcttgcaaaaagccgaacagttgagccacaaaatagccacagagaagagagagcacaagagaatatataaagatcaatacaaagaatggggttcccatcattagcggaaattggaagtctcgttgttccgcggggaaatcattgaggcgagtgcggaatgagtattccgtctatgccgcgcagtggagacatcctcccccggactgatgcgttgttcgttgacctataagaaacggcttttactgatccggtggcttatgactggctaatgaacggccatgttaccccagctcttgtttccccgagttctcgaaactcggaaatatgccgtagccgagccaaagaagaaccctgagatggagggggcctataagagatgcatgcgtctcccactggtcatgaaaatctgcaatttcttgtcaaacttcctctatcatggcgatccaaacacttgcagtcgccgttatcacggtggtgtatttcatcattcgctattttaaccgcaccgatatccctaagatcaaaggcctcccggagatccctggagtacccatcttcggaaacctcctgcaactaggagatcagcatgcaacagtcacggggaaatgggcaaagaagtttggaccggttttccaagtgcgcatgggaaacaaggtaagtgcttcgctttcacatgggaggtgacgagggagtttgtaatctaatgtccaattagcgcatcgtgttcgccaacagctttgaatccgtccgtcaattgtggattaaggattcatccgctctgatctcccgcccgactttccacactttccacagcgttgtctccagctcacaggggttcaccatcggaacatcgccgtgggatgattcctgcaagaaacgccgtaaggcagccgccacagcgctgaaccgaccggccgtgcaatcctacatgcctatcatcgatctcgaatccaattccagcatcaaagaactttaccgggacagccagaatggcaaacgtgatgtgaatcccactgcatacttccagcgatttgccctcaacaccagtttgactttgaactatggcttccgcattgaggggaatgtggatgatacgctgctgcacgaaattgtgaacgtggagcgtggcgtgtctaacttccgcagcacttcaaataactggcaggattacattcccctgttgcgaatcttccccaagatgaacaaagaggccgcagacttccggggtcgccgcgataaatatctgacctacttactcgatatcctcaaggatcggatcgccaagggtaccgacaagccttgcatcactggtaatatcttgaaggaccccgaagctaagctgaatgatggtaagttataaaaaattcccgtgtttgttgaactgagtactcatattttgtctagccgaggtgaaatcgatctgcctgactatggtgtcggctggtcttgacactgttccgggtaatttgattatgggaattgcctacctggcatctgaagacggtcaaagaattcagaagaaggcctatgatgcgatcatggaggtctacccaaatggggatgcttgggagaaatgcttggtagaggagaaggtcccctatgtaactgcactggtcaaggagatattgcgattctggacagtcattcctatttgtctgccacgcgagagcaccaaggatatccaatggaatggagccacaattcctgctggcacgactttcttcatggtaagccgctccttgtttctgtcctattcgtaaattactaacagagcctttagaatgcttgggctgccgattacgacgaagatcacttcaaagatgccgataaattcatcccggagcgttatttggaggtcaacgagggcgcaggtactccacactacgcatatggagctggttcacggatgtgtgcaggctcacatctcgctaatcgcgaactgtttactgcttttatccgcctcatcactgctttccacatgcacacggcgaaagatgcagccgaccgaccaatccttaatgcaattgagtgtaattcgattgcgacagccttgacaaccgagccaaagccattcaaggtcggatttagtgcacgcgaccctaagaagcttgagcagtggatcgccgagagcgatgaacgcaccaaggatctgtaagaggaccatattttggtttcctttttgaaaagaattctgttcaatgtggtttcctctatttttcggaggccatttatgtatctacaatatgtgaaatgaaagacaagggagtatagatatagacccgtgttggacctatataatcgactttggcctctctgcaggcctttaagaacctgaatgtagattagttatctgctagttctgagattcaattcctaaatggcacattttcccagtctataccagtctgtctcatttgataattcccccggggttccaaggtttgtggcggtttccccggcagaatctccccgcattttctctccgcacttttcttcctcttcaccctattccgttcagttgacatctgatcgctttaaattgtcttcaattgcatcgccttggatgatgaataccccgcatgtttaccctgcccccgagagctgggataacccacattcggtcgatgatacgaacgatgatcgcccgcggaaacgccgcaaatacatcgccaaagcctggtcagtttggaaaggttctcattcgagatggagtcctaacgagatagtgaagtaatggatgtaaacgtcgcaaaatcaagtgcaatggccagtcaccctgccagcgttgcggacgccagcatattgagtgtatatacgttgagaaccctcgagacagtcccgccgaacaagagtaatgcccaccccagctcggggcgtttaaaacaccactaattatgctttcaaagcaacttcaagctacttttcgatcaaatgagggccacgcaggaccagatttcccagttgtctgccagtattcggtcaatagccggcagcgaacattctcctgggggtatttccgctaccggcacctatgggcagctccatactcagcgtccacttagacgcctgtcaacagctagagagacatcatttcaaggcccgacgacatcggcctttagttttgaccttgcgaaatctagcctgcagcagcgcgggattgtggaacgtgctgaggctggcgacgagggcgatatgactcaagaaccttcaccgctggcgtcgccatcggcaccaaataaggaacttgaaacacaccaggctcttgatccactttgtgttcttcccaaagccgaggcacttcgcctttgccaagtctatgaggaggaaatgggcatcatgtacccggtcctggagctttcggagcttttggaccaggttaatcttctctacgggccgagggaccgcgcacttggaccgaccgcccagcccgagggacggaatggactgtttcgcgaagacgtccatatcctacgtgtagtttttgcgtgtgcgttgaccgctgaagccagtggtcggagtgaacaggctattgctctctttgacagtgtacgagaagttcaggacaattgtgtctggggtccgcccgaaatcaagagcatcatatttctgactctcgtggttcgtcatacccaatcaaatatgaatgcgacatgctaattacaacgatagtcaatgttctattttcaaatagatgaggaaattttagcgtggcgcactgttggtattgttgagcgcatgtgtctcgaaaaaggtcttcatcggcgggaaactctaaatcaaccggcaatcatggctgttgggaaagatcgcgttttgcgactcttctggtctgtatatattttggatatgcgttggagcttcgggactggaatgccgtttgctctggaagatacagatattgacccttggctaccagagccggccgagaaaacgccctatctgcgcgtgatgatccggtacagccggatcgcagcgaaggtatggaagtttatatcagcattcaacaacacaaacgaaatcaaaaaggaagagatgaactatttggattggcaggtgttgcgttgggtgcatgccattccagactcgttgcggctcgaacatccgagttctgcggagtctgagactgctaccgaaggctcacggagcctgcgcagactgcgtgctctcctttatcttcgtgctaatcagctacgcatgctcattcaccgtcccgtccttcatacttcagcgcatgttatgcggtatccaggcgaatcagaaaccgtggtgaaaatcgccaaagatacaattcgcttcattacccgcttgaacgatacatcggacatctatcatttacagcaggtggcttttaattggtttctcgtctcagcacttgcagcgttattcctggcagtagcccaggctccaacacaattcagtggatcatgtaaggaggagttttactgggcattggagctggtcaaaggagtctcagcccagtcttatatctctcgccggctatggaggtctattcgaagcctccgtaagcttggtcctcaactgggtctggggcttcagaaaaagtgcctggatatcgaagcgggagtcgaaagtgaccattcaaatgtccacggttcccccgcattacccctttctgccagtagccagagtcagacaccacaagacggggaacagatgacacaggagttgatggagtggtttgaagccgtggggaatctggaggaccaaataatgggcatggggacgggccctatgccaaatggaggaccttaccagcaaatgcccgacggggggtttgtgtttgattacggcgaagaattgtcaagtgtgatgagagatttcttctgattatgtacaacatgtgtcgatgtgaagtcttagacatgcgaatttgaaaaaaaaagaaaagggtgggggaggttaagactgacaatatccaacattgtctccggatttgtggttacattaagaactctgttctgtttctgatttcatgataatatgtgtagtaccccagaaagaatatcccaatattggagaggagaaaaaaagacagacgtgaagcaatatatgaatgtgaattccccggggtattcgatttcttcccgtgtgttgtaccgtgccaacatcgaggttgaactagtagatatatttaaagtccagttccccatcgcccgtttggactcgccgagtctcttctctttcaccactgataatttgctccttcaccttgttctcttgccgcaagtagagaccatatacagttactgtgacctgcgccaccgcaagggaccctaaggagaaggagttacccagcacataaggtgatgtgcgatatacctgaccggcaacaataccagaacagttggcgactgtctgctggagaccaattgcgagagcacgacggtattgtggggcgacattcacgttcagccaggcgatattgagaccaacggacgtgtaggtggtgataccgatgagaaaagtggcaaagtataggacggctgtattctctaccgtgagaagtatgatgtaaccgacgatgccgaagatattagctgcgaagatgtactgtgaaagagttagtgagaaacggtgcactagagattgcaaggggctaaacgcaccgatgcaaattgggaatatcggtctgagcaccaagcaattgcgataaagatcatggcagcccagacatagactggaaccgtcaagacgttgctcatcagggagtcatagcccatgccacgcaagatagttggcaggaaagtgctgaacccatacaagagaatatcctgacagaactggatgagagcgctgaacatcaacttggggtctctgattgcgatgcgcatttcttcccagctaaactcttcacttcccatatacctgcgacgctgctcgttgcgtacccgcatcatccatttctcctcttcggtgaggaagtaggcttcagccgggttatttggcaaaccgaaccagatgaggatggcacagatgaagctaaacagcccttcgatgatataaacccatctgaaacattgtaagccacaatatccttttgagtgggataacgagaagcatacctccatcctgctttgccaccaatcccgtccatctgcaagagcccgtaggccaagagaccacctacagcccccgagatggcagcgcaactcatcaaataggaaacgcgctttgcttgctcctctcgacgatagaccatggttaggtagagattgagacaagggaacagcccggcttcgcaagcgcccaagataagacgagtcgcgtagagagagcctaccgactggataaatccggtgaagatggtggtcagggaccaaacgatgcatagccccgtcaggatgttgcgaggtgtcaatttcttcatcatgaccgcccatggtgcttcgaaaagaacatatgtcacatagaagatggagacagcggtcgaaaactgctctgttgaagcgttgatatcctcaggcatattggcaaccttaacatttcctaagctttgtgagctttatgctctttcttggagatttaatcaaactcaccgatactcgatctgtccaggaaacaagtgagataggtcaacataatgatgggtacaaaggcagtatccaacttggcgaggagttttgcctctttctttggatctaacaccacatccaaaaattcggcgacggcataattggcttcttcggcatcctctttttgtaaggaatctttcagctccaagggtatattgtgaacggtattgtgggacatggctgcaatgggggttgcagcaaaatcgagggtttattgaaacaagtcagaactaatgaccattttaagaatgtttcgatcgtgacatagtggatcatagtgaaacggactcttatcttgggccacgcgatactggaagccgagtccactgtgagtgggtctatcgggccgatggtgataagagatggcagcaggtgagaggttgaagaggtgaagaagggccaatagagggccaatgagaagggtattgaggggatatcaattaatgcaagccaatccgatgatgcgaacagatcctcaccagaagaggcaagtcgatacggaggtgcgcgtatgtagtgggatgttcaggtgtaagagacctaactagggttaccatccccgattaataatctgccggcaatttgattctccaccagttgaaacttgacgacagcgggcggtatatccctcttggaaggcggtgtactatctgtggggtcttccccaaccttttccccagacctatcggtatgtggattccgaaaatgataaccgagggtatctgattgtcaagaggtagatattaatatgattgatatgtaaattgttaccttctacttttccgagaggaagctcaatatggacagtctcgcccagcaggcacgactgcgctgtcgctacaatcaactgaccaataccgcgggtgttgcaccgggatatttacaagcaaatcttctggtacttccttcgaaatatgctgcggatttccatgatttgtgtttgcgcaacccagttccttgtcccttactgggaataaccactgttcctggtgacccaaacgccgttagaccggcagaatgtattcggtccggagattttgatattcggacggattttcccaaataccgagtatattcgggcggaaagtgcattgagagtcggcatgacttgtccgatttatggactaaggaacatgtgggctttttaatcgggtgttcgttctcctttgaggatgccctgacggcggctgggttgccaccgcgtcaccaaaagactggcaccatagttgcaatgtaccgatcaaacattccattgttacccgctggaatattcacaggcggccactgtattgtatccatgcgaccgtatcgtccggagcaaatcgagagagtgagggacgttactcgggcctatctgtcgacgcatggagagcctgtcgcctggggatgggatggtgcgcagcaactaggaattcttgatgtggcaaagccagactttggagaacagcaaatgttcgaggagggcgaagttcccgtgttttgggtaagttaggtagtcacatatccaccttcgacggtttgatctgacttcatcccaggcctgtggagttacacctcaaattgccgtcgaagcagcaggtgataaaatcaaaggtctggtctttgcccacgagcccggacacatgctagtcacggattggacagcagaagacctgcagaaactcaaacccggaagcatctagaacaaaaaaaaagaaatcaacatgaatccatacaatcatcaacgtgatgatacttctcggctctattctcttgtgacccaacacagtatcaacttgaaagtcttcaaacaccatcgcgatatcatccccaatggcaacaatgccaacgaccgaaccagtcaggttgtaattggttagggggtttgggccagatggaagttgtttcatattctttgtggttattctaatgtgattcctcggaaggagatctcgtctcttcatcgaataccttctttcccctataccacgtttggcacactcgagcttcttaaagggactccggtgcccagatcatatcaaccacaacgaaattggctttgaatcccgcacgcagaatccctgtccatgattcagaaaaagacgcatatgcagtccccgcagtagctgccgacacagcggtcgcgagggaaacagcgcattcaggattgatggtatcttgcagggagggctggatagaggaccgccgggtggtagcaacgtagagattgggcagtgcctgatggttcgcagtgggggaatcggtgccaaaggccaaatgagcaccgccttcgacaaactcttggtaagcgaaagctcgcttgcaacgctgaatctcaagcatctctggccacccaccaaaggtcgctgggtcaaggtggacaggctggactgaggccactatcccgagttgaccaagtcttttagcgtcttcgggggttgttatctccaaatgttcaatgggatgacgacaggctggcaagtcctgaatttggcataaacagtcaatagcctgctgcactgttcgatcccaaactgcgtagatgacgcactgcaggccagcattagtagcacggcaaatagctaatgaaagggcatcggctggccagataggatcgacgatattggacaatccaccatatgcttggtgtaatcccgctgtacatccatccactgtgccgtcacagagtagtttgattccattgatacaaaattccgaggatatttttctgttgaaggtttgttgaatctcaatggcgcgatcaatgtgactgcagatatcggcatcgcattttgagtaaggtaccaaccagtgtaccgcaacatgcatcgggagctcaccacgctgatttctgtacatattcaacgccacccatccactctcccccatagccatatcgacgagtccagtatacccagcgcgttgatgcgcacggattgcagcatcaatcgcagccaccttgttcttcatagacatgacccggtccaaaaatggccaaacaacgtcgaattgcgccgcctcttcgagtaggccggacggggtcccattctgatagcgatgaatttttccgcctggaggatcgggtttcgactcagcctctagctctttgagagctgcattattgcaccacgttgagtgaaggtctaatgcctcaatgtagataggtcgcggatctaggtcgtccagtacagttgcggaagcgttaccatccgtaactgactggacccaacctcggcacaaaatgcgtggatctgatgggtgagttgctgcgtaggtggtgatggaactttggatatctgcgacgttcttgcaaggcaaaagatcgagtttctgcagcgatataccggagttgagaatatgtacatggccatcaataaaccctgggaggactattcgatttctcaagtccaccgttgatgctgtggcttgaacccgaacaatcgcttcgtcactgtcccaaccgacgtgcgcgagatggtcatcctcaactaccagtgtggagacaaagcgaccccatgaaccgggacatagaatacgcccattattaaaaatcgttgtaacgataatgatacggttaagggaagagggatggtgcagcaaaggtagcaagggtagttgactccttgagttgtcaaagttgaagttgagattgggttggtgtagctgacgtggacaaataagacacagacatgggatgccattggctgtatgagattgggcaacatttaaatggtgtaacattaagaggacatggaaagaaaaagcaatgaaatctttatttcagattgtcttattctatagacctctccttctctcggtgcgtattttctgtttcggatagctttgttgatcatatatagaaacccacacatctataactccatgtctttgaagataataacttatgttttgatgaatggaaattatactcggggtttcagtgtggattctcatttctgacaatagcgtggacgttttagatcaagatcgtaaaatcaactttctttgtgctagcaggaattcctaatagatatagttcataattaattatctacacaaggcataattcccgcgagaccactcttatatcagctagcttctggaattgtagtatccccgttcaaagtcgttgacccgatcgaggacaaatacaggtccctatggctgtggccatttttggattcttgacctcgacagatgtttaacggctcagtgtttaggagaattttctggttgtgttcatccactgaagaaaaatgttgctcctcattccaaagaatggcggaaatatgtcaattatttccgaccagggtatgctaaggttcaaagtctttgcaaaggatgtcaagatggaaacggtagttgggaaggtccatattgaagttcctatatatgctcatctctcgcgtagggagcatctactactgggctaggagtcttgcggcagctacagccggaattaaacttcttctattgattattttataccccaggatctcaacttggtgtatttgtcagtttatgcttcgaatcgtggcgccatccaccaccaatgacagcatgactcggttatctgagatatatggctgatgccggaggttatcttaagcctctcaacaattgctgagggaatccgatccaactacatccatagctttatatgtggtatttgttaagccgagacttcccggtcccgaaatctgcggtacataagaaatatcccacgcagttgagattctacgtgtgtaaggagtccggagtaatatgtatcatacgattcatacctatcaactatcatcaattgatcccttgcgaagggtggattcccgagatcggcgttcggcattgtctccgacaagtggcggggacattcagcactcgaaatacgtcaatttgtcagccgatggattattcccagtgaatacataaggggggaatctccacgtctctgaatctccgaatctccgaatagatcaattgttaatttctagagaataaataatgggatctcctttgtttcgttccccgccaatccaccgggccgagggtctgccctattttacccccgccaacgatgccggagcagctataaacgcacaggaccccagcatcccgacactgttccgccctttacgaattcgagatgtcatactcaagaaccgcgtgatcgtggcgcctatgtgcacgtactctgccgaatcggacccaacttctccggctgtaggcgcgctcacagattttcacatcgcgcaccttggtcatttggcgacaaagggggtcggtctgattataatcgaagcaacatcagttcagcccaatggtcgtatatcgcccaatgattccggcctttggcaggacgggacagactcagaacagttcaaaggactccagcgcgtggtgaagttcgctcatagccaaggcgcgaagatcggcgttcagcttgctcatgccggccggaaggctagcacggtggcgccctggctcgcatcccaagcaaagcaacgcggcatcaaagccgatgaaagtgtcggcggctggccctcaaatgtggttggcccctctggtggggaagagcagatttgggcacctggcgatcaattctggccccctcgcgagcttgaaacggccgaggttgaagaaattgtccgggcgtttgcacgaagtgcagggctcgctgtgcaggcaggagtggatgtaattgagatccacggtgcacacggatacttgctccatcaattcctcagccccgttaccaatcgacgaaccgacaaatatggtggtagctttcagaaccgaactcggttcttatgcgaggtggctgcagcaatccgtgccgttgtgcccagtggaatgcccttgtttcttcgtatcagtgcgacagattggctcgagaatcaaactgtcgcagaaggaaccggaagctgggacatgccatcctcaattcaactcgccaagatgttaccagacctagggattgactttctggatgttagctcaggcggtaatcacagaagccaacggattgagcctcatacgaactatcagattgacctcgctggccaaattcgccaagaaattcacgccgccaaacataagacactggttggagctgttggctttattaccgagcccgagtccgctcgcgatattgttcagggtgcagaagaagagaggcaggcgaacgaggcaatgctgtctggcctaaagccccaggctgatgccgtgttaatggcccgtcaatttctgcgcgagcccgaatgggtgctggcggcggcaaagaaactggatgtgaaggtatctctcccgcggcaatttgcccgaggcttactgtaaagtggacacatataattcatagaccaatctttctaactgcatgattgtaaacctgcggtgtccctgttccgagtctcagtacagactgtagtaccgcacatccatagtccaagactgagaaagcgggaagattctcgacgatcatttccatattggaattcccctatcatctttcacgaagacttcttctcaattttctatgagagggccctcgtccgacccttatccagcccaggtgacttgttgtatacgaatctggggcgaatggtgtacttgttatcaaccacgactcccgtgcgtcccgccctgtccagttacaagccaatgattgatcaacgtgcaatgccaagcaccgggccaagactcgggagccggtgttacaatgcatttggagatgaattggtactagattggcattgtttatgaggggctgttggcttgccctagcagataaagcaggaatataaaatcgacgcttccaacttccaacttgctgatgctctctgtattcatcctacattcttgattgtaggcttgattactcaacgcattccaaaaaaaaaccacaatgggaatctctcgcactgcctgggttctggtcttcgccttccagcctttccttggcggagcgttgcctgccccctcaccacctgggatcccgtctacctctactgcaacgagtgagctggcaggattgaccgttgctgcacagggatcacaggatggatatagccgtgatgaatttccgcactggattactatcagcgggtgagtagatggagtcactgtgaacctgaagtgttggctgctcaaattgttggcgacagaaattgcgacacacgcgagacaatcctcaaacgggacggaaccaacgtggtccaaagctctagctgcagtgctaccagtggatcctggttctctccgtatgatggcgcaacctggacagctgcaagtgatgtcgacattgatcacctcgtcccgttgtcaaatgcatggaaggtgagctcggaccatctgacaacattgaccttgagatattaatgaatattcgcagtctggcgcgtccagctggaccaaagcagatcgtcaagcctttgccaatgacctcacgaatccccagctcctagcagtcactgacaacgtgaactccgcaaagggcgacaaaggcccggaatcgtggaagcctcccctaggtacgtggtaaaccatgtgtattgtctagtctatggtttctgacatagaacagcttcatattactgcacttacgccaaaatgtgggtgaaggtgaaatcggtttatgatcttaccgttacttcggacgagaaggctgctcttgttgaaatgctagcgacttgttaaaaagtttgaatacgttgtagtgagaatcaacatcgaatttgcattcataggatttgacacctaattttctaaacgcgccgcaatcgtacaattcatgtcctaatggaatcataatatagaagcaggtgatctaaagcagtatcgtagaaacgactgtgctccgcggactgaaaaggggagggcactgggaccagcggcacgaatcgaggggactggaaaatggccgagttaagtgaaagaagggtttatccggtgatccaaacttgaaccggcattcaaggaaaatattgggaatattagatcataatgcaatggttgttttattgaactaagaggaagtgcgttgttcattaaaatagtctgaagtgtcaggcaccgagatagatgacacgtggtagtcacgtggcaatagagcttggccggaacaacctgggaagttacgtgttatcgggtgactttgggggggaacgatattccgagatttcgttatcggagcactccggagaaagggaccggaacattgacggtccgaatccatcgacggggtaatgacatgtacaacagcctaggacggagtactccgccgtactccgtgcttcatacagaactatgtgcatacaacataattctactattttctactatctactattcataatctcattatttgaccaagcattgccttgacaaaatatattttccttgatctatgtggaatcatcatcggtgtcctgaaggctgacacacgaacgatcatttcttcacctttactaatcatctattcgcccggggctttgagaaagctgtgggtctgaggattttcaagtggagttattttcagccaagcattttccaatgatgcttcttgtccgcacgaaccataaaccaggttttgtggcaagccctcgggggttggatatgtgggatcgagggctccgatttctcggctcacgaatccaaagtgtttcgtgttcttgacccggcccccgagcctcactctttatgctcccattattattagcattatgaccttgccgggtgagaaaaaaactaccgatgagcttcaggatgcggagaaaaataccgatgcctgtcgtcaaagccgggcattgcttttgtcggaggaagaagcccttgaaaaagcacggagcagtcctaatgacgcgctaccgattcagataatatacgccgccagtgacccagataacccccggaactggccaaaatggcgcaaatggtatatcacctgtgtggtgagcatgctcaatgttttcacgtacgtacacttatcactccttcccagtcgaggcttatctcactcgtcccatacagcacatggtgcgcagggggcatttcctccggtgctgccggaatacaaaaagagtttggggtatcggctgaggtcactactttatgtttatctctatatattcttggatacgcaatcggccccgtccttctcgccccactctccgaatactttggtcggcagccggtttacgctgtatcatggtttggtttgttcattttccagcttccgctggctatggccccaaacatcggtactgttctggcatgtcgattcattgcaggctgtgccggaggtgcgcccctgacaaacattggaggtagtatcagcgacctctgggaacggaacgagagcggagggcccatggccgtctacgggctgagtagtacgtttgggcctcctatggcgttggtgatcaccggttatattggacttaacctcggctggcggtggatattttgggttttgatggccatgacgggcggcatttgggtcttgttggtaaccacaattcccgagacacgacacaccacagtgcttaagaggaagaccaaacgcgcacgcaagcagatgaagaaagagaatcttcaatccgcagaatctaccaccgatatgcatgcgaatagcagaaaagggctttacgaactattcgctattaccctcactcgtccattccgatttcttttttcagagcccatcacgctgttttcggcaatctataatggctttctgtatggattggtatatcttttcaacgaggcgatccctctggttttcggcgctccgaaagggcacccattcaataccggccaacagggacttgccttcttgggactggcgattggaccgttgattgcattctgtttctacccactacaagaacgatactatctgcgccgggttgccgagaacggcggcaacggcgttccagaggcgcggatgtggatggcccgtgggggtgcgattctcattcccatcagtctattttggtttgggtggacaagctatcggtcggtccattgggttgtcccaatcattgcctcgtcattatttggcgccggaatttatgttgtgattctgagcattctgaactacgttgtggatagttaccagacgtactcagcttcggctcttgctggtgtcattctggcgcgcaattttgtcggcgccggattcccattgttcgccgctcagatgtatgagaaattggactatgaatgggcttcctctctcttgggattcatctccattcttcttgtgccaattccattccttttcttctacaggggaagagccattcgcctacgaagcccgtgggcgcgggagtacttcgaccagaacgaagacagcccgcattaacaactttcggggatagcctcaacttcgatttgaaaagcgtgaaaagaaaacttccttgttaggaggcatatcaaatgatgtattctcaagttcaatagcttgctagacccttaatctcctagaagttttcagttgtactgaatatgcgccgatgctcaatgcgactacaatcctcatctaggagatttatagtcgctaacacatcaagatgtaattctgccgtttctcatattgaaaccgggtgtaaaattggtttggtcccgactgatctatgcgcccttagtgatcaatgatcatctgctcatcgtccccgtgaggatgcaattacccctatctttttagtaacgttattgaagagctgcttttccctcacaactgcaaatccggatagattatagtcgtcaatttcagacgaaacacgtagtgaagtatcccgccgtagtctattagtccccggaaaacttgctacacttgtttgtagagatattaagggccgtaaccgagtcattgtaaactttacagatcaggcagtgatacttccgggtcattatgacttgggaccacaaagttgacatctggagtgtgttggcatgttggtaggataacaacctatgcagtcacttgcggtcaccgtgaaaactgacattagctcagatctaggatctttttgagcatcgccacatttgaagggctcgaaatcccgctgaacttgatgatgggtatcctcttgccgaaatgcaggcagtcctgggaagccctcctctcaaactcctcggtcggagcgaaaggagccaccagttttgggatgaaaaaggtttgtgcggctatcccctaagaatgattcaaatcatatttgccaaatttaataattgtatcaggtaattggaaagtgcagatccattgtcagatttcaacctcgaggcgctagaagagagactcaaagatgatgcaaaagaggaatttttacgttttcttcggcgaatgctatgttggctcccagaagaaagagcgtccgctaagctgctttttgatctttggttaatgcgtggcctctgtaaatgagaccatggataggtcacttctgatgatatgcattcatttatccatttactaatggtacagagggattcagtaattcattattgtcaacataaggaaaaagccaactcattctcggcaataatggcaatacttggccaatcgggggctctacagccttaggaatcagttcctcatagtcgtgactgtcacaatccactacagatcgctatcatctacttcaagtttgtttgtttgcttacttgctcgtttgcttgcttacttattgtttgcattgtttaccagtttctatgatatagattgtttgctagatagctaagcgagatattagaggtgtacaatgtttgcaaagggacagctatatcaacaggctgcctcccacctcctaccttgcaacttgcttcttttttctccccccatcttagttattatatattgaacgcaatcttctatcttcgaaaaacctggcacgtcatattggtaatctagcaaataaaattcattctaaccccctttagaaaaatcctcttagaacctataactatgctaactaaggctgatagcgacgaatggcatcaagcgcgagtgcagtagaaatacctcggttcccagccacagtctcttagaataatactgatacagagttcccatctcccatccaccatccaccatccaccatccatcatctggctcttgtatcgatagtaagactttcagccctgaaatatgacgaaccccaacttggtggcaaacaatcagtcgcatggcgagacttaccgcatccactggcccgaatctgggatcccgctctctcgatggattttttttcggagtggagtggccatttttcctcgattgttgttttgatgccaaaagtgcaagtaagcatattgcatacctgggcacatcactacagtggtccggaggggctagtctacggtattgtagttcaggggtaagaatttatttctttgtaccagaggggataataactgcaccctcatatcacaacaagaagaattgcagtaaaaaatgctgaagtactcgggtctctcggcaagtctaagtgttacgtgccaattcgattcagaagaaaagagtgcaattcaaaccagaatctaagtacaaagaaggaaaggaaaagagaaactatctgtgtgcgtgttcttcccctttgacgtccttccgtttgcattcgatgcaaaactcgcaattgtctcgcttaatctcgtttgtcattctaggaaggtgcgaggccgagggcgtggtcgttcctgcctgtttggtaggtacgatccttcctagatcgtcatactaagcccctaagcagtggatgagctaactagttagttaactaggttagttaatgatatgtaatgggtgactaagccagttacagggttggcagttctttacactatacggagtagtatcggttgaattctccaatggtgactagatcgactaagaccataagaacgtggatcctgcgaaggacttggcggcatgcgagtgtcaaatcaatcatagtttcggatcagattagttggccaagccaacggaaatcttctccttccacgcgaatcttggccgaaagagatttttttatccttctgtttcctgatcatccccctttctccgccttttctcttgaattaagaaaattgtaatcaagttgcttcgtattgtacgaaggagtattgttatgttcactcaaactgccaaggaccaggaacaattcaccaacgatcccctggacgggcagacgccaagatgccaagactaaagaggtatggctcggaatcttacgtgtgaccgaacactgattcctattgactataattggtacggagtattatggacgaatcttacaagctgagagtgtaaagttcttcagtcttctctttatcagattccatctaatctgataaagctgatggcatccaataagtaagtctggaatactattgccactgggacatatggcagaactttcgaacgaattaggaaaaagcagaagaccctgccagacttctatagtggtgtcttcagtctattccccaccgcaatgaggctatgcagaaaaattcccccacatgtctttgattatcaacggatctgataggggaaactagctttgtcttacccgaacagtgatttagatctgtcgatctgtactatgcaggactttcaggcttttcttggcctctcttggctcattttgcgcgatttccatgagaatatgagcgcagtagataagttcctcccatcttggtataagaagattcgtatccttttctgagcataaccctcttcagtcaagaaccaagggttcaatataccactatgagccccttcttcctggtagtcagcctgtggcaagccacgttggtaacagcaagcgctctatgtgcgactggctgtcagactgcggtttccaacaacgaattttcaggcatcagcatccttgaggactattattcagctttgtgccaaaactccctccaagtgaaggcaacattcatttgtatgcgagactactgcccagaagacgaaattgcaaaaggatggaatgatctcaatcaggtgtgtgaacaagatggaggagttgagcttcttccatggtctatcattgacgatgtgacggacgcggagacaaaatcttggcctatcttgacctatgaggatatccaacttggctctacctttaacacctcagtttctgtggatcagagcctcttccaacttgcgtatcagacaaatgtgagttatactatatcactggatctgattgatgattaactggtgtctagttcgactgggatgatcaaactacgcggcgaacgaactacgggtaactcatagatccacccactcccttggttttcacaattacttacgcacataccttcctcatagatatgctacaattggattctggggattgatagtactttttggtgcccttgacaatcttttccgatatttaaacaatttgtctgtgctgcgctcgagaacaatgacaagattcgaaagctccgttcgccgactggtagtcgtgccaccgatcttgaagaaaagtccattcacgcgcttttgcggtattccttctacatcaagactacaagccatgactatctcggccttcttcgtgatcaacataatcctcatgtgtgtggaataccgtgctttcgaaaataatctttagtgagaccagattttatcctcctcctgattggccaaccggataatgagttgactgacctcccttcccatagcttcacccgaaagtcctcacagctttggcgttatatagcagatagggcggcggtcatggcgatcagcaatttaccagtcatgtggctcttttccacaagaaacaattgtcttttgtgggcaacatcctgggaatttgggacctttaatacctttcaccgttggattggaagagcttgtgctatagaggtatttgtccatgggatgggggtttgtatctatcaatatcaaggtgtgtctattcgcattcttttcgctggaggcctttgagaaaatattcccgagttggattgaagttgacaaagtttgagaatgaagaggttggaaaggagtttttcttgcctctctggaaagagcgtgacttctatatgggagttgttgtaagtcaaaaattccgtgtattctctgccttagctaatacgctctcacaggcagctctctcgattatcgtgacgtgccttttagcaagctcgggaatccgaagggcagcctatgaattatttttgatagttcaccaggcttttgctgttcttattcttgctgcgttgtggtagtgagttcctttcagcatcaacttttaggaacatgcttgactaacggaatttccagccatctaactgtcgatggcccagatcatgtcccatacctttggccttgtattgctgtttggtcatttgatagactgggaagggtgtttcgtctattgatctggaacaagccaacttcacactcctctggagaatacaacagtgacgcagatctcattcaggtaaaggcccgcatacgacgagttgttgctcctcaacctggaagttacttctatgtgtatgggtggcggtctctttatttttgggaaagtcacccatttacacttagcgggtggactacggtcaatacggaagaagaatcttacacagaactcgtatttcttattggagtccacggaggcttcacatccaggcttcgcaaacagctgcttcgtcaagatgagtccgggatcgactcttcatcctctgtgagaaaggttcacctggctgttgaaggtccttatggtccacatttcgatccgtggaattctgaaatggccgtttttgtcattggtggcgcgggtatcacgatcgcaacgtctttcatccaacagctggtagatttcgtgcggcttggcaagcacgtggatcaaaagatcaagtgcttgaagataatatgggccataaagaacatcgagctttatcggttcgtctatgagcgctatatatcaacgtgggaagtggtcttcgcatcaacatatattgaaatctcactggacgtgtacctgacaagcccttccaaggcggatcaacaagttgaattgccgatgccagaatctcaaaccggacacagtgcgacaaaaaagaaaatacgagcagttgtatcgccggtgtgttcaatgaactttcatgcctcggaggaaaaagtggcttctgaagaggtgcataaccagtcagcgtttgggcctctaaaaacaaatctcattcacggaaggccaatcatccgcgatgtgattagaagccaagttgaaagcttcaattcttacccggagcaacagattgcactgatcggctgtggaccggatacaatggcacacgacatacgcctttcctttgcagaatcctcaaaagagactgacgtcaacattatctttcacctggcccctttcggctggtgattgatgttcttgtttatccttgaacctggaataaatattcaatgattcactgtactcatgtatttatgtcacattttcaccgcatcgatatgaagttgaaatgctatcctcgtgattatcaaggaatgtgtcttctccgagatactgtagtacttagggccatcttcattcttgtatagcactattagtgggaaggggcttagtggaatggaatttctggaatttttgcaaagggagctatatcaacaggctgccttctagtttgcaacttgcttcttcatcctctccctatcttagtagttattttatatttgaaagaactgtcacgtcacattaataatgtagcaaataaaattgatactaaccccttcagataaattctcttagaacctatgtgctaaccagggctgacagcgacgaatggcatcaagcgcgagtgcagtagaagtacctcggtttcctagccatagcctcttagaataatactgatatagagttcctatctcccatccaccatctggttcttgcatcgatagtaggaatttaagccctgaaacatgacgaactccaacttggtggcaaacaatcagtcgcatggcgagacttgccgcatccactggtacactaagacgttcctccagccgcttaataagcaatcctcgcattcgaatatagacacaaggccgatgattcttaaggcgtaacatcatgcgcgataggaagaagaagaatgcctcagggagtggatagaaggcggatccgtggatgtaagtccgtgtttggaggacttggtaaacccaatcaaaggtctcagagagctcattaccccagccatactggtagaaaatattcaaaatattgcaacacacgattgggtccacacgcttcttgaagtcagtgaagaaggtctggcggcccgcgggtggaagatgtcagtttttcaaagagctcacagttttctccactggtgaagctcatacctgcatcagaccatcagatgttcgatactgaagcatcttgtccatcacaagattggcaacgtgagtgggccgattcaaaattgtaataccgagtgatgtcgtgtccatatcatcggggaagtcagcttgggtaagaacaggtgtaactactctggtcagtctgtgttaacagatatgcagacgggcaatgatcactttcataccgataaaaaggttccatgtggtccgatggcttccaatatcaatcaagcttctgttctggatcagctaattgaataaattattttccgggctttgacaaacctgtcgccagtgagctcaagtatgagcagttgcgtgaagttttccttcactggtacgccggtatgggtgaaggaatggtgtttttgagcattctcatggagatatcgcgtacctcgcccaatagggtcaatgtcgacaaaattcaaaatgctgcggtacagcgaataatctgatggcataacgccctgcatccccatagacattgcagcaagtaagttactcgtgtcatcatctaccaagatgacctgctccgagctcaatcctatctgatttaggacatgttgataaaatcgcaattcaggcttctgcatgccgatatcacttgacacaaaaacacgttcgaacaaagaccaatcaaacccaagaaactttaccaaggcgtagtcctctttggaaaaatttgtaaccgcatatagctcgaagagacctttagacttggccttcattgaagccaatgcctccacgactttggggttcacacatagtgattttcgtacagcaaggatagctttctttatctcctcctgaggatggcgaaagtcggacgccagtcgcgcaaagtattgctcttcggtgatgcgaccacattggtattccactgttgctccacagtatagaatagacttgagagtatttgtgggaagttctatgttctgcattgaggaatgcaagacaatatttttcaactcaatcagaacccctttgtagggaatgcgcttgatgattttacccatgatgatatttccgggttgaggtggcatatggagaccttattgtcgagcactactaaatagtcgagtcgtgtaagcggtcaagtagccttgttgctacgagtcgctgagcgtcagcccgaccttgatggactgccaccacgtctgttgagaaaataccgtcagttgagccgaggccagtgtatgtatcgtaccaatgggaatttcatccctttttataagcggaaatttgtgctaattatattgaattcaatagtagcagcagagagtcattctcgataactctgggtcgtgacttgatccgtattgtggacggcaggttctggcgcactacagacagcgaaccaatattgcaggatctcaacctccaaatcaagtgcgagacactaacagcagtggttggaccttctggatgcggtaagacgactctctttgaggccctattgagagagcttccatgtccacttgactctatccaagttaactccgcatttgacctacgaaccggtgtcgcatactgttcacaacaaccgtggctcagaaacgacactgttcggaataacatcatcgccggcatgccgtacaatgaagcctggtacaacaccgtaattcatgcttgtgcattggaggaaatcatccagaagctgagcgaaggaatggtcggcagtggaggcaggagcctgagtggagggcagaagcagagaattgttagcatacctcaatgctgcattgagagtcacagctaacattccgctagtcgttggcgcgcgccatatactcgcgtcgcccacttcttctgcttgatgactccctttcgggaattgataatctctccatacagcatattttcgatcgtttgctgggtgttgatggcttgataaagcagacgggtacaacagccatccttgcaacacaaaatggtaagaacttagaataaccgacgcaaatatgcgagaataacaagaatacattagtggaaaactcaagtctctttgaccagatcatcactctcggtggtgataccactgtgctcgaacgaaaatcccatgccgacgctatgaagaattcagagaagccaatcggtccagggaagcttcctattgaggcgcccatttccatatcccagaatccattcgcgttcgccctggaagccaggtttgagaccgcggcttccgaccctcgcgacccccggaaaggtgaactgggggcatacaaataccactttgcctccttgggcttcaggaaattgggcctcgccgtctttctggtcgtatcttatgtattcttctcctcgttcccccgtgagtcatcacctgtcgatattcgatgattatcactcatctcattcgcttgcagaaatttggcttgaatggtggactgcttctaatgtagaccaccctaataacaggttgggctattggattggggtatacgctgtttttggatttctggccgtcttctccctgattactgcttcatggtttgtctcaatcatcacaaactcgctccttagtctgacattaaacaggctcatgctttgcaacatggtgaagaactcagcgaagtctctgcatttggaactggtccagactgttgagcggtgggtatccttttcggaagctgttagtgaacagatttgctaacatcttcacagggccgtcgcatctgtgttcacttctacagatccaggaatcacagtgaaccggttcgtctttcaaccgataagctgaatatcaacagctttttctgaccatttgaacagatttagtcaggatatggctttaatcgatatggaattgcctatggccttcgccaacactattatctgtcagtttgtgtcttccaaatacctgcccacgcgacttactaatatttctagccttcacaacctgcgtggcacaactcgttatcattgctgtgtcttcacgtcatcttggtgccgccatccctttcatccgcggcttttgtattctcactcaacggctatctattcgaaagtcacgacaattacggttctttgatatcgaagccaagagtctgttgtacacggagttcattgaactgctgaacggcccctatgtggttcgcgccttcgatatgcagaaggaatttgagcaacggctttccatagcactcgatgcatcacagaagccgttttatctcctcctctgtgcgcagcaatggctgggtttggtactaaatttggtgaatctcggtctagcgttgatcttagttggtgtcacaacagccacttgtggcctctcgggtggctttttaggtgttgcgctgatcaatctgaaaagctttggaccaagcttatccgaattggttgatgtgtggtgtatattgcagaatagtctcgccgcagttgagcgtgtgaaacctttctccgaggaaaccccgaaagagtccacagactagcctgttagcccgtcgctaggctggccccagctaggggccattcaaatgcagtaagtatgtctgggatacgagtcagtggataatattggctcgaaatacttagtcgcagctaatatctaacttgaaaacagctctggttcactcgccgtcaaatccctgtcacttgctatcccggcaggaaataagattgtcatatgtggccgaagtggcaggtaagcagcttccgcgggaatgtcaaaacaatttgaactaacatcagggtttcacaaagcggaaaatcaacgttgtgcatggctctcttccgcatgcttgatccgatatccggcaccatctcgatcgatagacaagatataactcgagtcccctacaaacttcttcgctcggcactttctattgtccctcaggatgcagtgatcctaggaggatcaatctgactcaatgttgaccttgaaaatcagcattccgacagagaagtcatcgaagcattagaacaagccgaactatgggagtccgttaaagagcgattcaggagagaagacgatacaagcgccgaatctctttccgggggccagaagaagcaactctgccttgcgcgcgcgttagtcaaaaacagtaaaatcttagttttagataaggcaacagccaggttcgccttgaacagtcagttcgctccaattttgaattcaactaacctgccacggtagtgccgactctgcgaccgatcaaagggtccatgggcttgttaatcgaggtctacctggaacgacggttgtttctgttatacatcggttgaagcatgttggtttgtatgatctcgtcgctgtctttgatgacggtgagctggtggagatgggtaacctggtagaactgctcgaggactcagcttcgaggctagtggagctgtttgtacgtgattgactcgatatatagccttgcgatagtatcataaatagtgcagtgggggtttccagagcaggatgactaagcggctatatgacataaaagcactcccgaggcctagatagtaacgtagatacctttctacctctcttctcagtagtcaccctatggtattctcctctctagtaccctactactcctagtaacgactctactcttatacctatttcgcaggtagggctgtcggtaccccttaggggtcccctctttatatagtgaccgatgtagggagtagcgttaactagtatattagggagggggtaactactaaatctaccttaccagccttttaccactccttttaccagttacctggctgaatgaacgttatccttaaagcgatatcctaataagtttctactaccttctataatcagccgccttagtaataaccataccctacgtttcagtcttcagtaacgtggcccaaccttgggctgagaagtcaggcccgaagcccgacccagcgacgggtcgnnnnnnnnnnnnnnnnnnnnnnnnnnnnnnnnnnnnnnnnnnnnnnnnnnnnnnnnnnnnnnnnnnnnnnnnnnnnnnnnnnnnnnnnnnnnnnnnnnnnnnnnnnnnnnnnnnnnnnnnnnnnnnnnnnnnnnnnnnnnnnnnnnnnnnnnnnnnnnnnnnnnnnnnnnnnnnnnnnnnnnnnnnnnnnnnnnnnnnnnnnnnnnnnnnnnnnnnnnnnnnnnnnnnnnnnnnnnnnnnnnnnnnncccccggggggggggggggggtcgggtcaaaacgggctttgatctacttggacctccctaaaaggtcgaataagaattaagcgagataaatgtaagaggataagaagggaagaacatatacttagatagtttctctttttccttttcttctttatacttagaatttggttggaattgtactcttttcttctgaatcgaattggcttgtaacatgaaatgctttatgagaatgccaggaaaccacctaaaaaagtcgggatcattgaatttgtatggtgccaaatgcttcatgctcatgggtaaggctggcagattactaagctctctgtaatggtaattcaggtgtccttacttttctgccaggcaaaattcagccattaaggccctaatatggtgaaaacgaccctgcgcgctatgccccttcgtacccgttgtcatagctgggatagaaacaacactcgattctcggaagaggatggcttgttccttctgtggacaacgggaagcgagatatggagaattgttttaagtacaatgaattcaatcatccattttttcgccagccaagcagtttcctgcgacaggccacggttctcagtatcacaaggcgaggttttttagccagccagtctccaggacctcggatttcattcccacctgctctcagtttgaatccacttcgatgcccaatgtcaacaaaattggattcgacgaagccgcccatttttgactatcttcccaaaatctggatgcctcttccaagctcttggcaaaaaggcttcaacaatatggtcgggtccttccaggtccagtaatccacatatctcagctcgacatgttcgaaaatcgtcacctgaataaagttagcttataccattctactgcgcatctagaacataatggtccatagaatttagatcagtggcataattaccattctatgcatagtggcatcgatgacaagcataatgttggcattccactgggcttcgattggcaccaacaagaactatgcctgcacaaaattccctgaggccataattcctgccgtggcagtcacagcattcccagcccatgcggattagatcctggacaaagcaatacgcttcaccacatggagaatccactgcaacatctgtgacagttctctcctgcccacacattgtctgtctccctgttctttggttgactctagcataacgacaatatgttatacctcgttggagaattcgatgtccacaacgatagactcgatactggcgaccacacattgtttttaataaaagccaaagaaaaatacgtgcagaatgcttttgtcgaccgaaacgatgtgaattggataaagaatattttgaatatgtcttcgttgagtattttaatcaagaagaggatcttggaagcttccttattgcttatatgtccaaatgcctatagtattgtcctatttttggcttgataatgcgacactgaggggctacatggcggttgccgcttcgaacctttggcgcttaggtctgaaactatcttagtcaattccactaattacatcatgtcaggttgttcgttatagaatatggtagcgttttacatcatgcgaatcatgacactctatgttcgaagtaattataggtttttagtgacgttacattaaccgccaactttgtagtctaataaatgaaaaagcactaagtaccgggcctcacttttcagaagctaggagaaagcagagggaggtcctcgatttcttgtatacagtaaaatatacataaaagagagaaaaatcatattcgacgaacgaggatactaaaactagatataattatatctcgagatctgactatactcggtctagaaaatgcgctcacctttaggtcatctagcttattgccgcccactactctccctcccctccaactttgccctgtgacagcgcttagtcgaaaatactttcacccgttaggtaatccaacttattgacccctcttctcctccatatgtggatgaaaatctctcacatccatgtctagatagtgagtagatgtcacattgcaggactcctagagtactgcatatttcttagtaaagagcttaatcaagactaaggaaaaagggaaacaagggaaaaaagaagtcgaaaagtcagggaaactggaattaggcagaggtagacaacgtacacagaatcaagatgcaaacatagtgaatgcatacaggaccaagcattgcaaccaatcacagattaatgtataaagagagtaaaggaaattgctgccttagcctatcagagggtgtaacagcggacagtagaaagtataagcccagaacgatagtcatctagtattcattcaaaaaggtaccgcttaatattttcaagtccctgcagatctccctcggtcgagttagacttctccttctcaacccaaccttcagtatagcctcctccaaaatcaatcaggtatgcatcctcattgacatcaatgagcacattggctgccttcgcatctccccaaatgatattatgtgaatgaaagtgttcaagtgtctgcgaaatttgatcaacccatttttgtcggagctcggaaaatttgggatcatgtccatcaatgcaattgagtgtagctctatcacaattaatgtatgataaagccaatcccaatatatacccatcatcatcttggaccagcccttccagttgtgatgtgagaattgggggatcgaatttagccatgcgaatctttgaataagtgagaatctctcttgcggtaatacccatgtcacccccatagactatcttgaagaagctaggccgtggttgcccatgaataaataccttatgaggtattcctggtagtgcagctgaatctgtactaattggaacctggacttcccttgggtggtagacagaaaaagctgagtagtcgacagaagatggtaaagatgccccgatgagatgatttctcatgttcttggtgttgctgagataaacgggaactaatttgtctccaactacctgcacagtgtagtgcaattcttctgcaaacagacaatcctcgagagtgtacttttggttcgggtccaggggagcaatttcgtgaaagattggcagaaatggttgcaagatccaatcatgcatttcatcaagggggtcttcaaattccccctccacatctatctcagactcatcaggaatccattctggttcttgacgttgaacgtgtcgaagatattcggccaggagggcaggcgagctttcgaagctggaagtaaaaagatcgatcttgaagcgtttgttggagacataaacattcaactgcgtgtctgtgtttctggtgcttgatctaaatggaccgatatcatagatgggttgtttccgtgccatcgttggccatcgaggagttgcggcaagggaaaaaaaaataaaaaataaaaactaaaaagtaaaaagtaaaaagaaggtaggagtaagaaactgtcaggtcgggggaagtgaggtgtacacggcacaaagtcatgtgactgtcgaccaataggtaagtccggcaaataaataaccatcttcaccgccatcaccctctgcaatacttgattggaaaagctacaggaaaggggttgagcctggagaaccgacaggacggtatgattttcggcctcggacgccatgtgagtagaaaacgaataaattgaaacaatgcttttctactgcaagtttgtagtaacgtatttttgatcactttagcgcccttttcaactcgaggatgatgaatgccaatcattagtcgttgttgatatatacccaggtgaaacgcctacggcggaagcccattgtgcaatagtcgccacagtctagattggtgcttgaattagatttcgagacatctagatgctgatgcaagtggccgaaattatctgggcgcttagctaaaaattatacgacggcaactgacatcgcgttgtcccctatccctactttcagggacaaaatcccaacaagtgcatttcacggtggcaaaggaaaggaagaccattagaggtttcatgttgtgcgtctcgccgtgtaatgcaacctgcgccgcacggaagtttcacctgcatggcatatccacgccaatcaaggttagcaatgcaatataacgtcattctcggcgtcaatcttttttaggtgtctgcttttggactccaaccctcttgggtaatagaagctcgtattccatgcgcatgtcaatgttaactgacgacttaagcatatgtgatgaaagaaccaaatagcagccagtgagaattcaatatctgggaagaaggcttggtgcaattcaagtatacagcatgtttagtcatcttccttgaaccatccatcagcccagtgtgaggtctcaatcataggaggggcgtcattgcgttattcggtggtcccgaggctctgtgcacgaggcaaactgaactgccttagttgatctggctatcagggctgggccaaagatcctcgatagccgtacgccctttggaggtctaggaataattgtactgcaagtttctctgaaaaggtctaattggctgaaggccaagaccaaccacaatgcacagctccatgtatgcatggcatgtatgtatggaggggtaaagcactcgctcaatcagacgatactgttggctcatgccgaggttggccaatggggctgtgtgtggtgtctgcattgccctcttttgggcaaccgccctgccagaccatgattatgcatttgcgcacagtcttgggtttacttcctaatatagttatggccagttttgtgctatttccaaatttggtaactaatcaactttcgagaaacttcctattttgtattccagggcgaccaagaaacaaacgtcgttccttctcactgcctatctattaaattatataccgccccctattattactatacgttacgaaacccacttcttccttcttcaacccctcaaccatggttcaacagatagagcttgcctgcgatcaacgcctacattatcgtatccttcgagataaaggctatacgtatccctctattatatcccgtttaaattgcagtatacagtaaactcaatatacgtattataatcaaaccatactgtagaagaagaagataggccgacttccaaagcttacccctgagtgccttaacgaagtaatcctatagatttagcaatctctgaagtatcgctatctaaattatcataatatctatggtattttagatcttagtatatctagggaaacacttcgcctatcttgtaacggataaaggtccgtacaagagggaaacacatgcaaacctgcacaggctcgggaaggaacatctatgtcatcacacatctgtttcgatatcgatccgtgaggggtccgtgtgagacccctaggtatggaatatctaagggaatgctgtatgtaatggaggatcgggaaacagagacagtagtatacgcagtggtatattggaactaatagctgcttctctagggaagcagtatgcgaggacaatatataggtttgtgggtcacatgattcatagaggctgtgtaagcaacacgcgttgctcctatccagtccacagtccccccacgcaccatgacaggtaccatacttcaggcatcagccttcttagtactggggccctgacactacaccgtattaaaacaattgaatacagtgattaataataaattactggcagaataacagtggagaacgacgtttgtttcttggtcgtacactgtgcctgcatgcatgagacttcgtctcatagtccccaacgtggctttcccccgcaccagccaattgtctcttcggcacgggaatccacagtaagatagcgaccgttacaaactcagctttagatccatcttattctgctatttccaggaggctcgaggcataaactaccacctgtcagttagcattgtaaatatctgaatcacggaggagtagctacatatttggaataaccaaaaacatactaactcaacggggtcggagaatatcttcctgtctttcttcccaggaatattttaaggtactctcttggttccgccataaccgttgcatttggtgcatatagatgtactaaccattcccacatcattgcattcagtgcaaggcatgttttcttttccgacgtgttgattcaaaagcagaggggaaagtggcgatattcttgtacggggaagggcaaaacaggggatgttgtagttatcgtagaaaagtcaaggttaaagaaagaaagaggatatttatagccctttagttccgatacccaaactcgttgggtggcaaaccccgacagtggccagagctcccaatgaccctcccaactaggcttgtacacatttcggctctccacatacccaacgcgatgccgaatcctcgttttgttgcagtcgatccaagccagagaaagaagcgaagggtgaaaacaccgcaatgccagacttgtttcaattcattcggaacataacaagaattccgcgaccatatcgcagactatcaggccagtaaagtcgtgactctccaatttatccgctgacttgccagtttagttggaattccagctctttgttcttcgcccttgtcattttcaatgtgatccaccccaagcaagattcttgttggaccggacgccaactggccgaaaatcagcaaagaggaaaagtaggccaccaaacaagcgaaggaggcgaagcaattggccaaggcaggtggcttgacatctcctacggtctagtttgacaccttattttcatcctcaagcgttggagtggatttttttatgaatatgacgatctatataaaaaacatacaataaatcgtccgtactacactgggtactcgtactgatcacctcctacatggttaaaatatttaaataagctgctgctcaggtgtaagaagttacttcataaccattcgcgaatgctttcgaggctaactggtttccccggttgtttactcccaaccccaagaatctcgggagatttgcgggatcggcgatcgtgcacggacataaggtggcaccaccaaggtagacacaccgtcggagagaagttggaggccccccactggtcctcatatcacttcgccatgtctctcgagctgtaccacactgcacacaacgccggccagaccaccgtcgtactaatccatggcgccttggtatctggtctctactgggatcttgtgatcccccacctcacgtcttatcgcctcctggtcccagatcttccaggccatggcaattccgccagcgcgccattttcagtggatctcgcagcgcgtcagattgcccagctgatccgtatacacgcgaatggttcagcgcacattgttggccacagtctgggtgctcaggtcgctatccgcctggcctgtaccgaaccagatgtggtgaactctgtcttcatctctggttttagaatgttccctcaaacatcacttacgccgtatattccatacgcagtgtgggtgatgctgcgtgtggagaactgccttagccggcctcttatcagctgggcaatggatggtgccgatatcccacgtattgataccaatctcggtacacttgacctatgtcgccagattgtatcaccggagcatcctacacaatggccatcaccatggcctgcgcgcactctgattgttgcagcggggaaaggggggttagtgcctacaaaggatagcccgggtgatgctgtgaagttgatggcgatcgggagagagctgaacgaagagactatcgcgtatacacatttgaaaatgcgacatccgtggaatcgtcaggatccgcggctatttgcagagactgccgcggcgtggtttgaacataaggagcttcccgagggctttgtcaagctttagcgtcgggtagatgactgtttgaaaatagaagtttgtcccaggacttggatcccataaactccatattaaggaacatcaagataaaatagaactttggatgacaattgtcgtgcctggggggtggtaccacctaagcagcggctgatttggtcaagcgggggcgtctgacaccctttcatgaatgcctaaacatcaacttcaggagttaaaggtgttgaaagattgattcaagggctcgaataatcttcgctgagcgccttttgggagtcaatttcccacgatgcgtgcagatattggccattacgccagagatgtcgtcaattctatcccatccttccacggccagagtgctgttggtgatttgcaactattattcggtaatgatatcttaactatagcgctgtcgagctttggaatagtcggcttctcagtctggtcgatacggagaccgtggcaacgtccgatcaagaaggtcgcgctccaaggacgtgtagtctttgcgaaatcggtatttccgtctatataggaaatcatagagcctaagtacatataaaat
